(19) United States
(12) Patent Application Publication
(10) Pub. No.: US 2003/0065156 A1
(43) Pub. Date: Apr. 3, 2003

(54) Novel human genes and gene expression products I

(76) Inventors: Lewis T. Williams, Mill Valley, CA (US); Jaime Escobedo, Alamo, CA (US); Michael A. Innis, Moraga, CA (US); Pablo Dominguez Garcia, San Francisco, CA (US); Julie Sudduth-Klinger, Kensington, CA (US); Christoph Reinhard, Alameda, CA (US); Klause Giese, San Francisco, CA (US); Filippo Randazzo, Emeryville, CA (US); Giulia C. Kennedy, San Francisco, CA (US); David Pot, San Francisco, CA (US); Atlaf Kassam, Oakland, CA (US); George Lamson, Moraga, CA (US); Radoje Drmanac, Palo Alto, CA (US); Radomir Crkvenjakov, Sunnyvale, CA (US); Mark Dickson, Hollister, CA (US); Snezana Drmanac, Palo Alto, CA (US); Ivan Labat, Sunnyvale, CA (US); Dena Leshkowitz, Sunnyvale, CA (US); David Kita, Foster City, CA (US); Veronica Garcia, Sunnyvale, CA (US); Lee William Jones, Sunnyvale, CA (US); Birgit Stache-Crain, Sunnyvale, CA (US)

Correspondence Address: BOZICEVIC, FIELD & FRANCIS LLP, 200 MIDDLEFIELD RD, SUITE 200, MENLO PARK, CA, 94025, US

(21) Appl. No.: 10/076,555

(22) Filed: Feb. 15, 2002

Related U.S. Application Data
(63) Continuation of application No. 09/217,471, filed on Dec. 21, 1998.
(60) Provisional application No. 60/068,755, filed on Dec. 23, 1997.
(60) Provisional application No. 60/080,664, filed on Apr. 3, 1998.
(60) Provisional application No. 60/105,234, filed on Oct. 21, 1998.

(51) Int. Cl. C12Q 1/68; G01N 33/53; C07H 21/04

(52) U.S. Cl. 536/23.1; 435/6; 435/7.1

(57) ABSTRACT

This invention relates to novel human polynucleotides and variants thereof, their encoded polypeptides and variants thereof, to genes corresponding to these polynucleotides and to proteins expressed by the genes. The invention also relates to diagnostic and therapeutic agents employing such novel human polymucleotides, their corresponding genes or gene products, e.g., these genes and proteins, including probes, antisense constructs, and antibodies.

### CROSS-REFERENCES TO RELATED APPLICATIONS

[0001] This application is a continuation-in-part of U.S. provisional patent application serial No. 60/068,755, filed Dec. 23, 1997, and of U.S. provisional patent application serial No. 60/080,664, filed Apr. 3, 1998, and of U.S. provisional patent application serial No. 60/105,234, filed Oct. 21, 1998, each of which applications are incorporated herein by reference.

### FIELD OF THE INVENTION

[0002] The present invention relates to novel polynucleotides, particularly to novel polynucleotides of human origin that are expressed in a selected cell type, are differentially expressed in one cell type relative to another cell type (e.g., in cancerous cells, or in cells of a specific tissue origin) and/or share homology to polynucleotides encoding a gene product having an identified functional domain and/or activity.

### BACKGROUND OF THE INVENTION

[0003] Identification of novel polynucleotides, particularly those that encode an expressed gene product, is important in the advancement of drug discovery, diagnostic technologies, and the understanding of the progression and nature of complex diseases such as cancer. Identification of genes expressed in different cell types isolated from sources that differ in disease state or stage, developmental stage, exposure to various environmental factors, the tissue of origin, the species from which the tissue was isolated, and the like is key to identifying the genetic factors that are responsible for the phenotypes associated with these various differences This invention provides novel human polynucleotides, the polypeptides encoded by these polynucleotides, and the genes and proteins corresponding to these novel polynucleotides.

### SUMMARY OF THE INVENTION

[0004] This invention relates to novel human polynucleotides and variants thereof, their encoded polypeptides and variants thereof, to genes corresponding to these polynucleotides and to proteins expressed by the genes. The invention also relates to diagnostic and therapeutic agents employing such novel human polynucleotides, their corresponding genes or gene products, e.g., these genes and proteins, including probes, antisense constructs, and antibodies.

[0005] Accordingly, in one embodiment, the present invention features a library of polynucleotides, the library comprising the sequence information of at least one of SEQ ID NOS:1-844. In related aspects, the invention features a library provided on a nucleic acid array, or in a computer-readable format.

[0006] In one embodiment, the library is comprises a differentially expressed polynucleotide comprising a sequence selected from the group consisting of SEQ ID NOS:9, 39, 42, 52, 62, 74, 119, 172, 317, and 379. In specific related embodiments, the library comprises: 1) a polynucleotide that is differentially expressed in a human breast cancer cell, where the polynucleotide comprises a sequence selected from the group consisting of SEQ ID NOS:4, 9, 39, 42, 52, 62, 65, 66, 68, 74, 81, 114, 123, 144, 130, 157, 162, 172, 178, 183, 202, 214, 219, 223, 258, 298, 317, 338, 379, 384, 386, and 388; 2) a polynucleotide differentially expressed in a human colon cancer cell, where the polynucleotide comprises a sequence selected from the group consisting of SEQ ID NOS: 1, 39, 52, 97, 119, 134, 172, 176, 241, 288, 317, 357, 362, and 374; or 3) a polynucleotide differentially expressed in a human lung cancer cell, where the polynucleotide comprises a sequence selected from the group consisting of SEQ ID NOS: 9, 34, 42, 62, 74, 106, 119, 135, 154, 160, 260, 308, 323, 349, 361, 369, 371, 379, 395, 381, and 400.

[0007] In another aspect, the invention features an isolated polynucleotide comprising a nucleotide sequence having at least 90% sequence identity to an identifying sequence of SEQ ID NOS:1-844 or a degenerate variant thereof. In related aspects, the invention features recombinant host cells and vectors comprising the polynucleotides of the invention, as well as isolated polypeptides encoded by the polynucleotides of the invention and antibodies that specifically bind such polypeptides.

[0008] In one embodiment, the invention features an isolated polynucleotide comprising a sequence encoding a polypeptide of a protein family selected from the group consisting of: 4 transmembrane segments integral membrane proteins, 7 transmembrane receptors, ATPases associated with various cellular activities (AAA), eukaryotic aspartyl proteases, GATA family of transcription factors, G-protein alpha subunit, phorbol esters/diacylglycerol binding proteins, protein kinase, protein phosphatase 2C, protein tyrosine phosphatase, trypsin, wnt family of developmental signaling proteins, and WW/rsp5/WWP domain containing proteins. In a specific related embodiment, the invention features a polynucleotide comprising a sequence of one of SEQ ID NOS: 24, 41, 101, 157, 291, 305, 315, 341, 63, 116, 134, 136, 151, 384, 404, 308, 213, 367, 188, 251, 202, 315, 367, 397, 256, 382, 169, 23, 291, 324, 330, 341, 353, 188, 379, and 395.

[0009] In another embodiment, the invention features a polynucleotide comprising a sequence encoding a polypeptide having a functional domain selected from the group consisting of: Ank repeat, basic region plus leucine zipper transcription factors, bromodomain, EF-hand, SH3 domain, WD domain/G-beta repeats, zinc finger (C2H2 type), zinc finger (CCHC class), and zinc-binding metalloprotease domain. In a specific related embodiment, the invention features a polynucleotide comprising a sequence of one of SEQ ID NOS: 116, 251, 374, 97, 136, 242, 379, 306, 386, 18, 335, 61, 306, 386, 322, 306, and 395.

[0010] In another aspect, the invention features a method of detecting differentially expressed genes correlated with a cancerous state of a mammalian cell, where the method comprises the step of detecting at least one differentially expressed gene product in a test sample derived from a cell suspected of being cancerous, where the gene product is encoded by a gene corresponding to a sequence of at least one of SEQ ID NOS:4, 9, 39, 42, 52, 62, 65, 66, 68, 74, 81, 114, 123, 144, 130, 157, 162, 172, 178, 183, 202, 214, 219, 223, 258, 298, 317, 338, 379, 384, 386, 388, 1, 39, 52, 97, 119, 134, 172, 176, 241, 288, 317, 357, 362, 374, 9, 34, 42, 62, 74, 106, 119, 135, 154, 160, 260, 308, 323, 349, 361, 369, 371, 379, 395, 381, and 400. Detection of the differentially expressed gene product is correlated with a cancerous state of the cell from which the test sample was derived. In one embodiment, the detecting is by hybridization of the test sample to a reference array, wherein the reference array comprises an identifying sequence of at least one of SEQ ID NOS:1-844.

[0011] In one embodiment of the method of the invention, the cell is a breast tissue derived cell, and the differentially expressed gene product is encoded by a gene corresponding to a sequence of at least one of SEQ ID NOS: 4, 9, 39, 42, 52, 62, 65, 66, 68, 74, 81, 114, 123, 144, 130, 157, 162, 172, 178, 183, 202, 214, 219, 223, 258, 298, 317, 338, 379, 384, 386, and 388.

[0012] In another embodiment of the method of the invention, the cell is a colon tissue derived cell, and differentially expressed gene product is encoded by a gene corresponding to a sequence of at least one of SEQ ID NOS: 1, 39, 52, 97, 119, 134, 172, 176, 241, 288, 317, 357, 362, and 374.

[0013] In yet another embodiment of the method of the invention, the cell is a lung tissue derived cell, and differentially expressed gene product is encoded by a gene corresponding to a sequence of at least one of SEQ ID NOS: 9, 34, 42, 62, 74, 106, 119, 135, 154, 160, 260, 308, 323, 349, 361, 369, 371, 379, 395, 381, and 400.

[0014] Other aspects and embodiments of the invention will be readily apparent to the ordinarily skilled artisan upon reading the description provided herein.

### DETAILED DESCRIPTION OF THE INVENTION

[0015] The invention relates to polynucleotides comprising the disclosed nucleotide sequences, to full length cDNA, mRNA and genes corresponding to these sequences, and to polypeptides and proteins encoded by these polynucleotides and genes.

[0016] Also included are polynucleotides that encode polypeptides and proteins encoded by the polynucleotides of the Sequence Listing. The various polynucleotides that can encode these polypeptides and proteins differ because of the degeneracy of the genetic code, in that most amino acids are encoded by more than one triplet codon. The identity of such codons is well-known in this art, and this information can be used for the construction of the polynucleotides within the scope of the invention.

[0017] Polynucleotides encoding polypeptides and proteins that are variants of the polypeptides and proteins encoded by the polynucleotides and related cDNA and genes are also within the scope of the invention. The variants differ from wild type protein in having one or more amino acid substitutions that either enhance, add, or diminish a biological activity of the wild type protein. Once the amino acid change is selected, a polynucleotide encoding that variant is constructed according to the invention.

[0018] The following detailed description describes the polynucleotide compositions encompassed by the invention, methods for obtaining cDNA or genomic DNA encoding a full-length gene product, expression of these polynucleotides and genes, identification of structural motifs of the polynucleotides and genes, identification of the function of a gene product encoded by a gene corresponding to a polynucleotide of the invention, use of the provided polynucleotides as probes and in mapping and in tissue profiling, use of the corresponding polypeptides and other gene products to raise antibodies, and use of the polynucleotides and their encoded gene products for therapeutic and diagnostic purposes.

[0019] I. Polynucleotide Compositions

[0020] The scope of the invention with respect to polynucleotide compositions includes, but is not necessarily limited to, polynucleotides having a sequence set forth in any one of SEQ ID NOS:1-844; polynucleotides obtained from the biological materials described herein or other biological sources (particularly human sources) by hybridization under stringent conditions (particularly conditions of high stringency); genes corresponding to the provided polynucleotides; variants of the provided polynucleotides and their corresponding genes, particularly those variants that retain a biological activity of the encoded gene product (e.g., a biological activity ascribed to a gene product corresponding to the provided polynucleotides as a result of the assignment of the gene product to a protein family(ies) and/or identification of a functional domain present in the gene product). Other nucleic acid compositions contemplated by and within the scope of the present invention will be readily apparent to one of ordinary skill in the art when provided with the disclosure here.

[0021] The invention features polynucleotides that are expressed in cells of human tissue, specifically human colon, breast, and/or lung tissue. Novel nucleic acid compositions of the invention of particular interest comprise a sequence set forth in any one of SEQ ID NOS:1-844 or an identifying sequence thereof. An “identifying sequence” is a contiguous sequence of residues at least about 10 nt to about 20 nt in length, usually at least about 50 nt to about 100 nt in length, that uniquely identifies a polynucleotide sequence, e.g., exhibits less than 90%, usually less than about 80% to about 85% sequence identity to any contiguous nucleotide sequence of more than about 20 nt. Thus, the subject novel nucleic acid compositions include full length cDNAs or mRNAs that encompass an identifying sequence of contiguous nucleotides from any one of SEQ ID NOS:1-844.

[0022] The polynucleotides of the invention also include polynucleotides having sequence similarity or sequence identity. Nucleic acids having sequence similarity are detected by hybridization under low stringency conditions, for example, at 50° C. and 10×SSC (0.9 M saline/0.09 M sodium citrate) and remain bound when subjected to washing at 55° C. in 1×SSC. Sequence identity can be determined by hybridization under stringent conditions, for example, at 50° C. or higher and 0.1×SSC (9 mM saline/0.9 mM sodium citrate). Hybridization methods and conditions are well known in the art, see, e.g., U.S. Pat. No. 5,707,829. Nucleic acids that are substantially identical to the provided polynucleotide sequences, e.g. allelic variants, genetically altered versions of the gene, etc., bind to the provided polynucleotide sequences (SEQ ID NOS:1-844) under stringent hybridization conditions. By using probes, particularly labeled probes of DNA sequences, one can isolate homologous or related genes. The source of homologous genes can be any species, e.g. primate species, particularly human; rodents, such as rats and mice, canines, felines, bovines, ovines, equines, yeast, nematodes, etc.

[0023] Preferably, hybridization is performed using at least 15 contiguous nucleotides of at least one of SEQ ID NOS: 1-844. That is, when at least 15 contiguous nucleotides of one of the disclosed SEQ ID NOs. is used as a probe, the probe will preferentially hybridize with a gene or mRNA (of the biological material) comprising the complementary sequence, allowing the identification and retrieval of the nucleic acids of the biological material that uniquely hybridize to the selected probe. Probes from more than one SEQ ID NO. will hybridize with the same gene or mRNA if the cDNA from which they were derived corresponds to one mRNA. Probes of more than 15 nucleotides can be used, but 15 nucleotides represents enough sequence for unique identification.

[0024] The polynucleotides of the invention also include naturally occurring variants of the nucleotide sequences (e.g., degenerate variants, allelic variants, etc.). Variants of the polynucleotides of the invention are identified by hybridization of putative variants with nucleotide sequences disclosed herein, preferably by hybridization under stringent conditions For example, by using appropriate wash conditions, variants of the polynucleotides of the invention can be identified where the allelic variant exhibits at most about 25-30% base pair mismatches relative to the selected polynucleotide probe. In general, allelic variants contain 15-25% base pair mismatches, and can contain as little as even 5-15%, or 2-5%, or 1-2% base pair mismatches, as well as a single base-pair mismatch.

[0025] The invention also encompasses homologs corresponding to the polynucleotides of SEQ ID NOS:1-844, where the source of homologous genes can be any mammalian species, e.g., primate species, particularly human; rodents, such as rats, canines, felines, bovines, ovines, equines, yeast, nematodes, etc. Between mammalian species, e.g., human and mouse, homologs have substantial sequence similarity, e.g., at least 75% sequence identity, usually at least 90%, more usually at least 95% between nucleotide sequences. Sequence similarity is calculated based on a reference sequence, which may be a subset of a larger sequence, such as a conserved motif, coding region, flanking region, etc. A reference sequence will usually be at least about 18 contiguous nt long, more usually at least about 30 nt long, and may extend to the complete sequence that is being compared. Algorithms for sequence analysis are known in the art, such as BLAST, described in Altschul et al., J. Mol. Biol. (1990) 215:403-10.

[0026] In general, variants of the invention have a sequence identity greater than at least about 65%, preferably at least about 75%, more preferably at least about 85%, and can be greater than at least about 90% or more as determined by the Smith-Waterman homology search algorithm as implemented in MPSRCH program (Oxford Molecular). For the purposes of this invention, a preferred method of calculating percent identity is the Smith-Waterman algorithm, using the following. Global DNA sequence identity must be greater than 65% as determined by the Smith-Waterman homology search algorithm as implemented in MPSRCH program (Oxford Molecular) using an affine gap search with the following search parameters: gap open penalty, 12; and gap extension penalty, 1.

[0027] The subject nucleic acids can be cDNAs or genomic DNAs, as well as fragments thereof, particularly fragments that encode a biologically active gene product and/or are useful in the methods disclosed herein (e.g., in diagnosis, as a unique identifier of a differentially expressed gene of interest, etc.). The term “cDNA” as used herein is intended to include all nucleic acids that share the arrangement of sequence elements found in native mature mRNA species, where sequence elements are exons and 3 and 5 non-coding regions. Normally mRNA species have contiguous exons, with the intervening introns, when present, being removed by nuclear RNA splicing, to create a continuous open reading frame encoding a polypeptide of the invention.

[0028] A genomic sequence of interest comprises the nucleic acid present between the initiation codon and the stop codon, as defined in the listed sequences, including all of the introns that are normally present in a native chromosome. It can further include the 3 and 5 untranslated regions found in the mature mRNA. It can further include specific transcriptional and translational regulatory sequences, such as promoters, enhancers, etc., including about 1 kb, but possibly more, of flanking genomic DNA at either the 5 and 3 end of the transcribed region. The genomic DNA can be isolated as a fragment of 100 kbp or smaller; and substantially free of flanking chromosomal sequence. The genomic DNA flanking the coding region, either 3 and 5, or internal regulatory sequences as sometimes found in introns, contains sequences required for proper tissue, stage-specific, or disease-state specific expression.

[0029] The nucleic acid compositions of the subject invention can encode all or a part of the subject differentially expressed polypeptides. Double or single stranded fragments can be obtained from the DNA sequence by chemically synthesizing oligonucleotides in accordance with conventional methods, by restriction enzyme digestion, by PCR amplification, etc. Isolated polynucleotides and polynucleotide fragments of the invention comprise at least about 10, about 15, about 20, about 35, about 50, about 100, about 150 to about 200, about 250 to about 300, or about 350 contiguous nucleotides selected from the polynucleotide sequences as shown in SEQ ID NOS:1-844. For the most part, fragments will be of at least 15 nt, usually at least 18 nt or 25 nt, and up to at least about 50 contiguous nt in length or more. In a preferred embodiment, the polynucleotide molecules comprise a contiguous sequence of at least twelve nucleotides selected from the group consisting of the polynucleotides shown in SEQ ID NOS:1-844.

[0030] Probes specific to the polynucleotides of the invention can be generated using the polynucleotide sequences disclosed in SEQ ID NOS:1-844. The probes are preferably at least about 12, 15, 16, 18, 20, 22, 24, or 25 nucleotide fragment of a corresponding contiguous sequence of SEQ ID NOS:1-844, and can be less than 2, 1, 0.5, 0.1, or 0.05 kb in length. The probes can be synthesized chemically or can be generated from longer polynucleotides using restriction enzymes. The probes can be labeled, for example, with a radioactive, biotinylated, or fluorescent tag. Preferably, probes are designed based upon an identifying sequence of a polynucleotide of one of SEQ ID NOS:1-844. More preferably, probes are designed based on a contiguous sequence of one of the subject polynucleotides that remain unmasked following application of a masking program for masking low complexity (e.g, XBLAST) to the sequence., i.e., one would select an unmasked region, as indicated by the polynucleotides outside the poly-n stretches of the masked sequence produced by the masking program.

[0031] The polynucleotides of the subject invention are isolated and obtained in substantial purity, generally as other than an intact chromosome. Usually, the polynucleotides, either as DNA or RNA, will be obtained substantially free of other naturally-occurring nucleic acid sequences, generally being at least about 50%, usually at least about 90% pure and are typically “recombinant”, e.g., flanked by one or more nucleotides with which it is not normally associated on a naturally occurring chromosome.

[0032] The polynucleotides of the invention can be provided as a linear molecule or within a circular molecule. They can be provided within autonomously replicating molecules (vectors) or within molecules without replication sequences. They can be regulated by their own or by other regulatory sequences, as is known in the art. The polynucleotides of the invention can be introduced into suitable host cells using a variety of techniques which are available in the art, such as transferrin polycation-mediated DNA transfer, transfection with naked or encapsulated nucleic acids, liposome-mediated DNA transfer, intracellular transportation of DNA-coated latex beads, protoplast fusion, viral infection, electroporation, gene gun, calcium phosphate-mediated transfection, and the like.

[0033] The subject nucleic acid compositions can be used to, for example, produce polypeptides, as probes for the detection of mRNA of the invention in biological samples (e.g., extracts of human cells) to generate additional copies of the polynucleotides, to generate ribozymes or antisense oligonucleotides, and as single stranded DNA probes or as triple-strand forming oligonucleotides. The probes described herein can be used to, for example, determine the presence or absence of the polynucleotide sequences as shown in SEQ ID NOS:1-844 or variants thereof in a sample. These and other uses are described in more detail below.

[0034] Use of Polynucleotides to Obtain Full-Length cDNA and Full-Length Human Gene and Promoter Region

[0035] Full-length cDNA molecules comprising the disclosed polynucleotides are obtained as follows. A polynucleotide having a sequence of one of SEQ ID NOS:1-844, or a portion thereof comprising at least 12, 15, 18, or 20 nucleotides, is used as a hybridization probe to detect hybridizing members of a cDNA library using probe design methods, cloning methods, and clone selection techniques such as those described in U.S. Pat. No. 5,654,173. Libraries of cDNA are made from selected tissues, such as normal or tumor tissue, or from tissues of a mammal treated with, for example, a pharmaceutical agent. Preferably, the tissue is the same as the tissue from which the polynucleotides of the invention were isolated, as both the polynucleotides described herein and the cDNA represent expressed genes. Most preferably, the cDNA library is made from the biological material described herein in the Examples. Alternatively, many cDNA libraries are available commercially. (Sambrook et al., Molecular Cloning: A Laboratory Manual, 2nd Ed., (1989) Cold Spring Harbor Press, Cold Spring Harbor, N.Y.). The choice of cell type for library construction can be made after the identity of the protein encoded by the gene corresponding to the polynucleotide of the invention is known. This will indicate which tissue and cell types are likely to express the related gene, and thus represent a suitable source for the mRNA for generating the cDNA. Where the provided polynucleotides are isolated from cDNA libraries, the libraries are prepared from mRNA of human colon cells, more preferably, human colon cancer cells, even more preferably, from a highly metastatic colon cell, Km12L4-A.

[0036] Techniques for producing and probing nucleic acid sequence libraries are described, for example, in Sambrook et al., Molecular Cloning: A Laboratory Manual, 2nd Ed., (1989) Cold Spring Harbor Press, Cold Spring Harbor, N.Y. The cDNA can be prepared by using primers based on sequence from SEQ ID NOS:1-844. In one embodiment, the cDNA library can be made from only poly-adenylated mRNA. Thus, poly-T primers can be used to prepare cDNA from the mRNA.

[0037] Members of the library that are larger than the provided polynucleotides, and preferably that encompass the complete coding sequence of the native message, are obtained. In order to confirm that the entire cDNA has been obtained, RNA protection experiments are performed as follows. Hybridization of a full-length cDNA to an mRNA will protect the RNA from RNase degradation. If the cDNA is not full length, then the portions of the mRNA that are not hybridized will be subject to RNase degradation. This is assayed, as is known in the art, by changes in electrophoretic mobility on polyacrylamide gels, or by detection of released monoribonucleotides. Sambrook et al., Molecular Cloning: A Laboratory Manual, 2nd Ed., (1989) Cold Spring Harbor Press, Cold Spring Harbor, N.Y. In order to obtain additional sequences 5′ to the end of a partial cDNA, 5′ RACE (PCR Protocols: A Guide to Methods and Applications, (1990) Academic Press, Inc.) is performed.

[0038] Genomic DNA is isolated using the provided polynucleotides in a manner similar to the isolation of full-length cDNAs. Briefly, the provided polynucleotides, or portions thereof, are used as probes to libraries of genomic DNA. Preferably, the library is obtained from the cell type that was used to generate the polynucleotides of the invention, but this is not essential. Most preferably, the genomic DNA is obtained from the biological material described herein in the Examples. Such libraries can be in vectors suitable for carrying large segments of a genome, such as P1 or YAC, as described in detail in Sambrook et al., 9.4-9.30. In addition, genomic sequences can be isolated from human BAC libraries, which are commercially available from Research Genetics, Inc., Huntville, Ala., USA, for example. In order to obtain additional 5′ or 3′ sequences, chromosome walking is performed, as described in Sambrook et al., such that adjacent and overlapping fragments of genomic DNA are isolated. These are mapped and pieced together, as is known in the art, using restriction digestion enzymes and DNA ligase.

[0039] Using the polynucleotide sequences of the invention, corresponding full-length genes can be isolated using both classical and PCR methods to construct and probe cDNA libraries. Using either method, Northern blots, preferably, are performed on a number of cell types to determine which cell lines express the gene of interest at the highest level. Classical methods of constructing cDNA libraries are taught in Sambrook et al., supra. With these methods, cDNA can be produced from mRNA and inserted into viral or expression vectors. Typically, libraries of mRNA comprising poly(A) tails can be produced with poly(T) primers. Similarly, cDNA libraries can be produced using the instant sequences as primers.

[0040] PCR methods are used to amplify the members of a cDNA library that comprise the desired insert. In this case, the desired insert will contain sequence from the full length cDNA that corresponds to the instant polynucleotides. Such PCR methods include gene trapping and RACE methods. Gene trapping entails inserting a member of a cDNA library into a vector. The vector then is denatured to produce single stranded molecules. Next, a substrate-bound probe, such a biotinylated oligo, is used to trap cDNA inserts of interest. Biotinylated probes can be linked to an avidin-bound solid substrate. PCR methods can be used to amplify the trapped cDNA. To trap sequences corresponding to the full length genes, the labeled probe sequence is based on the polynucleotide sequences of the invention. Random primers or primers specific to the library vector can be used to amplify the trapped cDNA. Such gene trapping techniques are described in Gruber et al., WO 95/04745 and Gruber et al., U.S. Pat. No. 5,500,356. Kits are commercially available to perform gene trapping experiments from, for example, Life Technologies, Gaithersburg, Md., USA.

[0041] “Rapid amplification of cDNA ends,” or RACE, is a PCR method of amplifying cDNAs from a number of different RNAs. The cDNAs are ligated to an oligonucleotide linker, and amplified by PCR using two primers. One primer is based on sequence from the instant polynucleotides, for which full length sequence is desired, and a second primer comprises sequence that hybridizes to the oligonucleotide linker to amplify the cDNA. A description of this methods is reported in WO 97/19110. In preferred embodiments of RACE, a common primer is designed to anneal to an arbitrary adaptor sequence ligated to cDNA ends (Apte and Siebert, Biotechniques (1993) 15:890-893; Edwards et al., Nuc. Acids Res. (1991) 19:5227-5232). When a single gene-specific RACE primer is paired with the common primer, preferential amplification of sequences between the single gene specific primer and the common primer occurs. Commercial cDNA pools modified for use in RACE are available.

[0042] Another PCR-based method generates full-length cDNA library with anchored ends without needing specific knowledge of the cDNA sequence. The method uses lock-docking primers (I-VI), where one primer, poly TV (I-III) locks over the polyA tail of eukaryotic mRNA producing first strand synthesis and a second primer, polyGH (IV-VI) locks onto the polyC tail added by terminal deoxynucleotidyl transferase (TdT). This method is described in WO 96/40998.

[0043] The promoter region of a gene generally is located 5′ to the initiation site for RNA polymerase II. Hundreds of promoter regions contain the “TATA” box, a sequence such as TATTA or TATAA, which is sensitive to mutations. The promoter region can be obtained by performing 5′ RACE using a primer from the coding region of the gene. Alternatively, the cDNA can be used as a probe for the genomic sequence, and the region 5′ to the coding region is identified by “walking up.” If the gene is highly expressed or differentially expressed, the promoter from the gene can be of use in a regulatory construct for a heterologous gene.

[0044] Once the full-length cDNA or gene is obtained, DNA encoding variants can be prepared by site-directed mutagenesis, described in detail in Sambrook et al., 15.3-15.63. The choice of codon or nucleotide to be replaced can be based on disclosure herein on optional changes in amino acids to achieve altered protein structure and/or function.

[0045] As an alternative method to obtaining DNA or RNA from a biological material, nucleic acid comprising nucleotides having the sequence of one or more polynucleotides of the invention can be synthesized. Thus, the invention encompasses nucleic acid molecules ranging in length from 15 nucleotides (corresponding to at least 15 contiguous nucleotides of one of SEQ ID NOS: 1-844) up to a maximum length suitable for one or more biological manipulations, including replication and expression, of the nucleic acid molecule. The invention includes but is not limited to (a) nucleic acid having the size of a full gene, and comprising at least one of SEQ ID NOS: 1-844; (b) the nucleic acid of (a) also comprising at least one additional gene, operably linked to permit expression of a fusion protein; (c) an expression vector comprising (a) or (b); (d) a plasmid comprising (a) or (b) and (e) a recombinant viral particle comprising (a) or (b). Once provided with the polynucleotides disclosed herein, construction or preparation of (a)-(e) are well within the skill in the art.

[0046] The sequence of a nucleic acid comprising at least 15 contiguous nucleotides of at least any one of SEQ ID NOS: 1-844, preferably the entire sequence of at least any one of SEQ ID NOS: 1-844, is not limited and can be any sequence of A, T, G, and/or C (for DNA) and A, U, G, and/or C (for RNA) or modified bases thereof, including inosine and pseudouridine. The choice of sequence will depend on the desired function and can be dictated by coding regions desired, the intron-like regions desired, and the regulatory regions desired. Where the entire sequence of any one of SEQ ID NOS: 1-844 is within the nucleic acid, the nucleic acid obtained is referred to herein as a polynucleotide comprising the sequence of any one of SEQ ID NOS: 1-844.

[0047] II. Expression of Polypeptide Encoded by Full-Length cDNA or Full-Length Gene

[0048] The provided polynucleotide (e.g., a polynucleotide having a sequence of one of SEQ ID NOS:1-844), the corresponding cDNA, or the full-length gene is used to express a partial or complete gene product.

[0049] Constructs of polynucleotides having sequences of SEQ ID NOS :1-844 can be generated synthetically. Alternatively, single-step assembly of a gene and entire plasmid from large numbers of oligodeoxyribonucleotides is described by, e.g., Stemmer et al., Gene (Amsterdam) (1995) 164(1):49-53. In this method, assembly PCR (the synthesis of long DNA sequences from large numbers of oligodeoxyribonucleotides (oligos)) is described. The method is derived from DNA shuffling (Stemmer, Nature (1994) 370:389-391), and does not rely on DNA ligase, but instead relies on DNA polymerase to build increasingly longer DNA fragments during the assembly process. For example, a 1.1-kb fragment containing the TEM-1 beta-lactamase-encoding gene (bla) can be assembled in a single reaction from a total of 56 oligos, each 40 nucleotides (nt) in length. The synthetic gene can be PCR amplified and cloned in a vector containing the tetracycline-resistance gene (Tc-R) as the sole selectable marker. Without relying on ampicillin (Ap) selection, 76% of the Tc-R colonies were Ap-R, making this approach a general method for the rapid and cost-effective synthesis of any gene.

[0050] Appropriate polynucleotide constructs are purified using standard recombinant DNA techniques as described in, for example, Sambrook et al., Molecular Cloning: A Laboratory Manual, 2nd Ed., (1989) Cold Spring Harbor Press, Cold Spring Harbor, N.Y., and under current regulations described in United States Dept. of HHS, National Institute of Health (NIH) Guidelines for Recombinant DNA Research. The gene product encoded by a polynucleotide of the invention is expressed in any expression system, including, for example, bacterial, yeast, insect, amphibian and mammalian systems. Suitable vectors and host cells are described in U.S. Pat. No. 5,654,173.

[0051] Bacteria.

[0052] Expression systems in bacteria include those described in Chang et al., Nature (1978) 275:615; Goeddel et al., Nature (1979) 281:544; Goeddel et al., Nucleic Acids Res. (1980) 8:4057; EP 0 036,776; U.S. Pat. No. 4,551,433; DeBoer et al., Proc. Natl. Acad. Sci. (USA) (1983) 80:21-25; and Siebenlist et al., Cell (1980) 20:269.

[0053] Yeast.

[0054] Expression systems in yeast include those described in Hinnen et al., Proc. Natl. Acad. Sci. (USA) (1978) 75:1929; Ito et al., J. Bacteriol. (1983) 153:163; Kurtz et al., Mol. Cell. Biol. (1986) 6:142; Kunze et al., J. Basic Microbiol. (1985) 25:141; Gleeson et al., J. Gen. Microbiol. (1986) 132:3459; Roggenkamp et al., Mol. Gen. Genet. (1986) 202:302; Das et al., J. Bacteriol. (1984) 158:1165; De Louvencourt et al., J. Bacteriol. (1983) 154:737; Van den Berg et al., Bio/Technology (1990) 8:135; Kunze et al., J. Basic Microbiol. (1985) 25:141; Cregg et al., Mol. Cell. Biol. (1985) 5:3376; U.S. Pat. Nos. 4,837,148 and 4,929,555; Beach and Nurse, Nature (1981) 300:706; Davidow et al., Curr. Genet. (1985) 10:380; Gaillardin et al., Curr. Genet. (1985) 10:49; Ballance et al., Biochem. Biophys. Res. Commun. (1983) 112:284-289; Tilburn et al., Gene (1983) 26:205-221; Yelton et al., Proc. Natl. Acad. Sci. (USA) (1984) 81:1470-1474; Kelly and Hynes, EMBO J. (1985) 4:475479; EP 0 244,234; and WO 91/00357.

[0055] Insect Cells.

[0056] Expression of heterologous genes in insects is accomplished as described in U.S. Pat. No. 4,745,051; Friesen et al., “The Regulation of Baculovirus Gene Expression”, in: The Molecular Biology Of Baculoviruses (1986) (W. Doerfler, ed.); EP 0 127,839; EP 0 155,476; and Vlak et al., J. Gen. Virol. (1988) 69:765-776; Miller et al., Ann. Rev. Microbiol. (1988) 42:177; Carbonell et al., Gene (1988) 73:409; Maeda et al., Nature (1985) 315:592-594; Lebacq-Verheyden et al., Mol. Cell. Biol. (1988) 8:3129; Smith et al., Proc. Natl. Acad. Sci. (USA) (1985) 82:8844; Miyajima et al., Gene (1987) 58:273; and Martin et al., DNA (1988) 7:99. Numerous baculoviral strains and variants and corresponding permissive insect host cells from hosts are described in Luckow et al., Bio/Technology (1988) 6:47-55, Miller et al., Generic Engineering (1986) 8:277-279, and Maeda et al., Nature (1985) 315:592-594.

[0057] Mammalian Cells.

[0058] Mammalian expression is accomplished as described in Dijkema et al., EMBO J. (1985) 4:761, Gorman et al., Proc. Natl. Acad. Sci. (USA) (1982) 79:6777, Boshart et al., Cell (1985) 41:521 and U.S. Pat. No. 4,399,216. Other features of mammalian expression are facilitated as described in Ham and Wallace, Meth. Enz. (1979) 58:44, Barnes and Sato, Anal. Biochem. (1980) 102:255, U.S. Pat. Nos. 4,767,704, 4,657,866, 4,927,762, 4,560,655, WO 90/103430, WO 87/00195, and U.S. RE 30,985.

[0059] Polynucleotide molecules comprising a polynucleotide sequence provided herein propagated by placing the molecule in a vector. Viral and non-viral vectors are used, including plasmids. The choice of plasmid will depend on the type of cell in which propagation is desired and the purpose of propagation. Certain vectors are useful for amplifying and making large amounts of the desired DNA sequence. Other vectors are suitable for expression in cells in culture. Still other vectors are suitable for transfer and expression in cells in a whole animal or person. The choice of appropriate vector is well within the skill of the art. Many such vectors are available commercially. The partial or full-length polynucleotide is inserted into a vector typically by means of DNA ligase attachment to a cleaved restriction enzyme site in the vector. Alternatively, the desired nucleotide sequence can be inserted by homologous recombination in vivo. Typically this is accomplished by attaching regions of homology to the vector on the flanks of the desired nucleotide sequence. Regions of homology are added by ligation of oligonucleotides, or by polymerase chain reaction using primers comprising both the region of homology and a portion of the desired nucleotide sequence, for example.

[0060] The polynucleotides set forth in SEQ ID NOS:1-844 or their corresponding full-length polynucleotides are linked to regulatory sequences as appropriate to obtain the desired expression properties. These can include promoters (attached either at the 5′ end of the sense strand or at the 3′ end of the antisense strand), enhancers, terminators, operators, repressors, and inducers. The promoters can be regulated or constitutive. In some situations it may be desirable to use conditionally active promoters, such as tissue-specific or developmental stage-specific promoters. These are linked to the desired nucleotide sequence using the techniques described above for linkage to vectors. Any techniques known in the art can be used.

[0061] When any of the above host cells, or other appropriate host cells or organisms, are used to replicate and/or express the polynucleotides or nucleic acids of the invention, the resulting replicated nucleic acid, RNA, expressed protein or polypeptide, is within the scope of the invention as a product of the host cell or organism. The product is recovered by any appropriate means known in the art.

[0062] Once the gene corresponding to a selected polynucleotide is identified, its expression can be regulated in the cell to which the gene is native. For example, an endogenous gene of a cell can be regulated by an exogenous regulatory sequence as disclosed in U.S. Pat. No. 5,641,670.

[0063] III. Identification of Functional and Structural Motifs of Novel Genes

[0064] A. Screening Polynucleotide Sequences and Amino Acid Sequences Against Publicly Available Databases

[0065] Translations of the nucleotide sequence of the provided polynucleotides, cDNAs or full genes can be aligned with individual known sequences. Similarity with individual sequences can be used to determine the activity of the polypeptides encoded by the polynucleotides of the invention. For example, sequences that show similarity with a chemokine sequence can exhibit chemokine activities. Also, sequences exhibiting similarity with more than one individual sequence can exhibit activities that are characteristic of either or both individual sequences.

[0066] The full length sequences and fragments of the polynucleotide sequences of the nearest neighbors can be used as probes and primers to identify and isolate the full length sequence corresponding to provided polynucleotides. The nearest neighbors can indicate a tissue or cell type to be used to construct a library for the full-length sequences corresponding to the provided polynucleotides.

[0067] Typically, a selected polynucleotide is translated in all six frames to determine the best alignment with the individual sequences. The sequences disclosed herein in the Sequence Listing are in a 5′ to 3′ orientation and translation in three frames can be sufficient (with a few specific exceptions as described in the Examples). These amino acid sequences are referred to, generally, as query sequences, which will be aligned with the individual sequences. Databases with individual sequences are described in “Computer Methods for Macromolecular Sequence Analysis” Methods in Enzymology (1996) 266, Doolittle, Academic Press, Inc., a division of Harcourt Brace & Co., San Diego, Calif., USA. Databases include Genbank, EMBL, and DNA Database of Japan (DDBJ).

[0068] Query and individual sequences can be aligned using the methods and computer programs described above, and include BLAST, available over the world wide web at http://ww.ncbi.nlm.nih.gov/BLAST/. Another alignment algorithm is Fasta, available in the Genetics Computing Group (GCG) package, Madison, Wis., USA, a wholly owned subsidiary of Oxford Molecular Group, Inc. Other techniques for alignment are described in Doolittle, supra. Preferably, an alignment program that permits gaps in the sequence is utilized to align the sequences. The Smith-Waterman is one type of algorithm that permits gaps in sequence alignments. See Meth. Mol. Biol. (1997) 70: 173-187. Also, the GAP program using the Needleman and Wunsch alignment method can be utilized to align sequences. An alternative search strategy uses MPSRCH software, which runs on a MASPAR computer. MPSRCH uses a Smith-Waterman algorithm to score sequences on a massively parallel computer. This approach improves ability to identify sequences that are distantly related matches, and is especially tolerant of small gaps and nucleotide sequence errors. Amino acid sequences encoded by the provided polynucleotides can be used to search both protein and DNA databases.

[0069] Results of individual and query sequence alignments can be divided into three categories, high similarity, weak similarity, and no similarity. Individual alignment results ranging from high similarity to weak similarity provide a basis for determining polypeptide activity and/or structure. Parameters for categorizing individual results include: percentage of the alignment region length where the strongest alignment is found, percent sequence identity, and p value.

[0070] The percentage of the alignment region length is calculated by counting the number of residues of the individual sequence found in the region of strongest alignment, e.g., contiguous region of the individual sequence that contains the greatest number of residues that are identical to the residues of the corresponding region of the aligned query sequence. This number is divided by the total residue length of the query sequence to calculate a percentage. For example, a query sequence of 20 amino acid residues might be aligned with a 20 amino acid region of an individual sequence. The individual sequence might be identical to amino acid residues 5, 9-15, and 17-19 of the query sequence. The region of strongest alignment is thus the region stretching from residue 9-19, an 11 amino acid stretch. The percentage of the alignment region length is: 11 (length of the region of strongest alignment) divided by (query sequence length) 20 or 55%.

[0071] Percent sequence identity is calculated by counting the number of amino acid matches between the query and individual sequence and dividing total number of matches by the number of residues of the individual sequences found in the region of strongest alignment. Thus, the percent identity in the example above would be 10 matches divided by 11 amino acids, or approximately, 90.9%.

[0072] P value is the probability that the alignment was produced by chance. For a single alignment, the p value can be calculated according to Karlin et al., Proc. Natl. Acad. Sci. (1990) 87:2264 and Karlin et al., Proc. Natl. Acad. Sci. (1993) 90. The p value of multiple alignments using the same query sequence can be calculated using an heuristic approach described in Altschul et al., Nat. Genet. (1994) 6:119. Alignment programs such as BLAST program can calculate the p value.

[0073] Another factor to consider for determining identity or similarity is the location of the similarity or identity. Strong local alignment can indicate similarity even if the length of alignment is short. Sequence identity scattered throughout the length of the query sequence also can indicate a similarity between the query and profile sequences. The boundaries of the region where the sequences align can be determined according to Doolittle, supra; BLAST or FAST programs; or by determining the area where sequence identity is highest.

[0074] High Similarity.

[0075] In general, in alignment results considered to be of high similarity, the percent of the alignment region length is typically at least about 55% of total length query sequence; more typically, at least about 58%; even more typically; at least about 60% of the total residue length of the query sequence. Usually, percent length of the alignment region can be as much as about 62%; more usually, as much as about 64%; even more usually, as much as about 66%. Further, for high similarity, the region of alignment, typically, exhibits at least about 75% of sequence identity; more typically, at least about 78%; even more typically; at least about 80% sequence identity. Usually, percent sequence identity can be as much as about 82%; more usually, as much as about 84%; even more usually, as much as about 86%.

[0076] The p value is used in conjunction with these methods. If high similarity is found, the query sequence is considered to have high similarity with a profile sequence when the p value is less than or equal to about 10⁻²; more usually; less than or equal to about 10⁻³; even more usually; less than or equal to about 10⁻⁴. More typically, the p value is no more than about 10⁻⁵; more typically; no more than or equal to about 10⁻¹⁰; even more typically; no more than or equal to about 10⁻¹⁵ for the query sequence to be considered high similarity.

[0077] Weak Similarity.

[0078] In general, where alignment results considered to be of weak similarity, there is no minimum percent length of the alignment region nor minimum length of alignment. A better showing of weak similarity is considered when the region of alignment is, typically, at least about 15 amino acid residues in length; more typically, at least about 20; even more typically; at least about 25 amino acid residues in length. Usually, length of the alignment region can be as much as about 30 amino acid residues; more usually, as much as about 40; even more usually, as much as about 60 amino acid residues. Further, for weak similarity, the region of alignment, typically, exhibits at least about 35% of sequence identity; more typically, at least about 40%; even more typically; at least about 45% sequence identity. Usually, percent sequence identity can be as much as about 50%; more usually, as much as about 55%; even more usually, as much as about 60%.

[0079] If low similarity is found, the query sequence is considered to have weak similarity with a profile sequence when the p value is usually less than or equal to about 10⁻²; more usually; less than or equal to about 10⁻³; even more usually; less than or equal to about 10⁻⁴. More typically, the p value is no more than about 10⁻⁵; more usually; no more than or equal to about 10⁻¹⁰; even more usually; no more than or equal to about 10⁻¹⁵ for the query sequence to be considered weak similarity.

[0080] Similarity Determined by Sequence Identity Alone.

[0081] Sequence identity alone can be used to determine similarity of a query sequence to an individual sequence and can indicate the activity of the sequence. Such an alignment, preferably, permits gaps to align sequences. Typically, the query sequence is related to the profile sequence if the sequence identity over the entire query sequence is at least about 15%; more typically, at least about 20%; even more typically, at least about 25%; even more typically, at least about 50%. Sequence identity alone as a measure of similarity is most useful when the query sequence is usually, at least 80 residues in length; more usually, 90 residues; even more usually, at least 95 amino acid residues in length. More typically, similarity can be concluded based on sequence identity alone when the query sequence is preferably 100 residues in length; more preferably, 120 residues in length; even more preferably, 150 amino acid residues in length.

[0082] Determining Activity from Alignments with Profile and Multiple Aligned Sequences.

[0083] Translations of the provided polynucleotides can be aligned with amino acid profiles that define either protein families or common motifs. Also, translations of the provided polynucleotides can be aligned to multiple sequence alignments (MSA) comprising the polypeptide sequences of members of protein families or motifs. Similarity or identity with profile sequences or MSAs can be used to determine the activity of the gene products (e.g., polypeptides) encoded by the provided polynucleotides or corresponding cDNA or genes. For example, sequences that show an identity or similarity with a chemokine profile or MSA can exhibit chemokine activities.

[0084] Profiles can designed manually by (1) creating an MSA, which is an alignment of the amino acid sequence of members that belong to the family and (2) constructing a statistical representation of the alignment. Such methods are described, for example, in Birney et al., Nucl. Acid Res. (1996) 24(14): 2730-2739. MSAs of some protein families and motifs are publicly available. For example, http://genome.wustl.edu/Pfam/ includes MSAs of 547 different families and motifs. These MSAs are described also in Sonnhammer et al., Proteins (1997) 28: 405-420. Other sources over the world wide web include the site at http://www.emblheidelberg.de/argos/ali/ali.htm1; alternatively, a message can be sent to ALI@EMBLHEIDELBERG.DE for the information. A brief description of these MSAs is reported in Pascarella et al., Prot. Eng. (1996) 9(3):249-25 1. Techniques for building profiles from MSAs are described in Sonnhammer et al., supra; Birney et al., supra; and “Computer Methods for Macromolecular Sequence Analysis,” Methods in Enzymology (1996) 266, Doolittle, Academic Press, Inc., a division of Harcourt Brace & Co., San Diego, Calif., USA.

[0085] Similarity between a query sequence and a protein family or motif can be determined by (a) comparing the query sequence against the profile and/or (b) aligning the query sequence with the members of the family or motif. Typically, a program such as Searchwise is used to compare the query sequence to the statistical representation of the multiple alignment, also known as a profile. The program is described in Birney et al., supra. Other techniques to compare the sequence and profile are described in Sonnhammer et al., supra and Doolittle, supra.

[0086] Next, methods described by Feng et al., J. Mol. Evol. (1987) 25:351 and Higgins et al., CABIOS (1989) 5:151 can be used align the query sequence with the members of a family or motif, also known as a MSA. Computer programs, such as PILEUP, can be used. See Feng et al., infra. In general, the following factors are used to determine if a similarity between a query sequence and a profile or MSA exists: (1) number of conserved residues found in the query sequence, (2) percentage of conserved residues found in the query sequence, (3) number of frameshifts, and (4) spacing between conserved residues.

[0087] Some alignment programs that both translate and align sequences can make any number of frameshifts when translating the nucleotide sequence to produce the best alignment. The fewer frameshifts needed to produce an alignment, the stronger the similarity or identity between the query and profile or MSAs. For example, a weak similarity resulting from no frameshifts can be a better indication of activity or structure of a query sequence, than a strong similarity resulting from two frameshifts. Preferably, three or fewer frameshifts are found in an alignment; more preferably two or fewer frameshifts; even more preferably, one or fewer frameshifts; even more preferably, no frameshifts are found in an alignment of query and profile or MSAs.

[0088] Conserved residues are those amino acids found at a particular position in all or some of the family or motif members. For example, most chemokines contain four conserved cysteines. Alternatively, a position is considered conserved if only a certain class of amino acids is found in a particular position in all or some of the family members. For example, the N-terminal position can contain a positively charged amino acid, such as lysine, arginine, or histidine.

[0089] Typically, a residue of a polypeptide is conserved when a class of amino acids or a single amino acid is found at a particular position in at least about 40% of all class members; more typically, at least about 50%; even more typically, at least about 60% of the members. Usually, a residue is conserved when a class or single amino acid is found in at least about 70% of the members of a family or motif; more usually, at least about 80%; even more usually, at least about 90%; even more usually, at least about 95%.

[0090] A residue is considered conserved when three unrelated amino acids are found at a particular position in the some or all of the members; more usually, two unrelated amino acids. These residues are conserved when the unrelated amino acids are found at particular positions in at least about 40% of all class member; more typically, at least about 50%; even more typically. at least about 60% of the members. Usually, a residue is conserved when a class or single amino acid is found in at least about 70% of the members of a family or motif, more usually, at least about 80%; even more usually, at least about 90%; even more usually, at least about 95%.

[0091] A query sequence has similarity to a profile or MSA when the query sequence comprises at least about 25% of the conserved residues of the profile or MSA; more usually, at least about 30%; even more usually; at least about 40%. Typically, the query sequence has a stronger similarity to a profile sequence or MSA when the query sequence comprises at least about 45% of the conserved residues of the profile or MSA; more typically, at least about 50%; even more typically; at least about 55%.

[0092] B. Screening Polynucleotide and Amino Acid Sequences Against Protein Profiles

[0093] The identify and function of the gene that correlates to a polynucleotide described herein can be determined by screening the polynucleotides or their corresponding amino acid sequences against profiles of protein families. Such profiles focus on common structural motifs among proteins of each family. Publicly available profiles are described above in Section IVA. Additional or alternative profiles are described below.

[0094] In comparing a novel polynucleotide with known sequences, several alignment tools are available. Examples include PileUp, which creates a multiple sequence alignment, and is described in Feng et al., J. Mol. Evol. (1987) 25:351. Another method, GAP, uses the alignment method of Needleman et al., J. Mol. Biol. (1970) 48:443. GAP is best suited for global alignment of sequences. A third method, BestFit, functions by inserting gaps to maximize the number of matches using the local homology algorithm of Smith et al., Adv. Appl. Math. (1981) 2:482. Exemplary protein profiles are provided below and in the examples.

[0095] Chemokines.

[0096] Chemokines are a family of proteins that have been implicated in lymphocyte trafficking, inflammatory diseases, angiogenesis, hematopoiesis, and viral infection. See, for example, Rollins, Blood (1997) 90(3):909-928, and Wells et al., J. Leuk. Biol. (1997) 61:545-550. U.S. Pat. No. 5,605,817 discloses DNA encoding a chemokine expressed in fetal spleen. U.S. Pat. No. 5,656,724 discloses chemokine-like proteins and methods of use. U.S. Pat. No. 5,602,008 discloses DNA encoding a chemokine expressed by liver.

[0097] Chemokine mutants are polypeptides having an amino acid sequence that possesses at least one amino acid substitution, addition, or deletion as compared to native chemokines. Fragments possess the same amino acid sequence of the native chemokines; mutants can lack the amino and/or carboxyl terminal sequences. Fusions are mutants, fragments, or native chemokines that also include amino and/or carboxyl terminal amino acid extensions.

[0098] The number or type of the amino acid changes is not critical, nor is the length or number of the amino acid deletions, or amino acid extensions that are incorporated in the chemokines as compared to the native chemokine amino acid sequences. A polynucleotide encoding one of these variant polypeptides will retain at least about 80% amino acid identity with at least one known chemokine. Preferably, these polypeptides will retain at least about 85% amino acid sequence identity, more preferably, at least about 90%; even more preferably, at least about 95%. In addition, the variants exhibit at least 80%; preferably about 90%; more preferably about 95% of at least one activity exhibited by a native chemokine, which includes immunological, biological, receptor binding, and signal transduction flunctions.

[0099] Assays for chemotaxis relating to neutrophils are described in Walz et al., Biochem. Biophys. Res. Commun. (1987) 149:755, Yoshimura et al., Proc. Natl. Acad. Sci. (USA) (1987) 84:9233, and Schroder et al., J. Immunol. (1987) 139:3474; to lymphocytes, Larsen et al., Science (1989) 243:1464, Carr et al., Proc. Natl. Acad. Sci. (USA) (1994) 91:3652; to tumor-infiltrating lymphocytes, Liao et al., J. Exp. Med (1995). 182:1301; to hematopoietic progenitors, Aiuti et al., J. Exp. Med. (1 997) 185:111; to monocytes, Valente et al., Biochem. (1988) 27:4162; and to natural killer cells, Loetscher et al., J. Immunol. (1996) 156:322, and Allavena et al., Eur. J. Immunol. (1994) 24:3233.

[0100] Assays for determining the biological activity of attracting eosinophils are described in Dahinden et al., J. Exp. Med. (1994) 179:751, Weber et al., J. Immunol. (1995) 154:4166, and Noso et al., Biochem. Biophys. Res. Commun. (1994) 200:1470; for attracting dendritic cells, Sozzani et al., J. Immunol. (1995) 155:3292; for attracting basophils, in Dahinden et al., J. Exp. Med. (1994) 1 79:751, Alam et al., J. Immunol. (1994) 152:1298, Alam et al., J. Exp. Med. (1992) 176:781; and for activating neutrophils, Maghazaci et al., Eur. J. Immunol. (1996) 26:315, and Taub et al., J. Immunol. (1995) 155:3877. Native chemokines can act as mitogens for fibroblasts, assayed as described in Mullenbach et al., J. Biol. Chem. (1986) 261:719.

[0101] Native chemokines exhibit binding activity with a number of receptors. Description of such receptors and assays to detect binding are described in, for example, Murphy et al., Science (1991) 253:1280; Combadiere et al., J. Biol. Chem. (1995) 270:29671; Daugherty et al., J. Exp. Med. (1996) 183:2349; Samson et al., Biochem. (1996) 35:3362; Raport et al., J. Biol. Chem. (1996) 271:17161; Combadiere et al., J. Leukoc. Biol. (1996) 60:147; Baba et al., J. Biol. Chem. (1997) 23:14893; Yosida et al., J. Biol. Chem. (1997) 272:13803; Arvannitakis et al., Nature (1997) 385:347, and other assays are known in the art.

[0102] Assays for kinase activation of chemokines are described by Yen et al., J. Leukoc. Biol. (1997) 61:529; Dubois et al., J. Immunol. (1996) 156:1356; Turner et al., J. Immunol. (1995) 155:2437. Assays for inhibition of angiogenesis or cell proliferation are described in Maione et al., Science (1990) 247:77. Glycosaminoglycan production can be induced by native chemokines, assayed as described in Castor et al., Proc. Natl. Acad. Sci. (USA) (1983) 80:765. Chemokine-mediated histamine release from basophils is assayed as described in Dahinden et al., J. Exp. Med. (1989) 170:1787; and White et al., Immunol. Lett. (1989) 22:151. Heparin binding is described in Luster et al., J. Exp. Med. (1995) 182:219.

[0103] Chemokines can possess dimerization activity, which can be assayed according to Burrows et al., Biochem. (1994)33:12741; and Zhang et al., Mol. Cell. Biol. (1995) 15:4851. Native chemokines can play a role in the inflammatory response of viruses. This activity can be assayed as described in Bleul et al., Nature (1996) 382:829; and Oberlin et al., Nature (1996) 382:833. Exocytosis of monocytes can be promoted by native chemokines. The assay for such activity is described in Uguccioni et al., Eur. J. Immunol. (1995) 25:64. Native chemokines also can inhibit hematopoietic stem cell proliferation. The method for testing for such activity is reported in Graham et al., Nature (1990) 344:442.

[0104] Death Domain Proteins.

[0105] Several protein families contain death domain motifs (Feinstein and Kimchi, TIBS Letters (1995) 20:242). Some death domain containing proteins are implicated in cytotoxic intracellular signaling (Cleveland et al., Cell (1995) 81:479, Pan et al, Science (1997) 276:111; Duan et al., Nature (1997) 385:86-89, and Chimlaiyan et al, Science (1996) 274:990). U.S. Pat. No. 5,563,039 describes a protein homologous to TRADD (Tumor Necrosis Factor Receptor-1 Associated Death Domain containing protein), and modifications of the active domain of TRADD that retain the functional characteristics of the protein, as well as apoptosis assays for testing the function of such death domain containing proteins. U.S. Pat. No. 5,658,883 discloses biologically active TGF-B1 peptides. U.S. Pat. No. 5,674,734 discloses RIP, which contains a C-terminal death domain and an N-terminal kinase domain.

[0106] Leukemia Inhibitory Factor (LIF).

[0107] An LIF profile is constructed from sequences of leukemia inhibitor factor, CT-1 (cardiotrophin-1), CNTF (ciliary neurotrophic factor), OSM (oncostatin M), and IL-6 (interleukin-6). This profile encompasses a family of secreted cytokines that have pleiotropic effects on many cell types including hepatocytes, osteoclasts, neuronal cells and cardiac myocytes, and can be used to detect additional genes encoding such proteins. These molecules are all structurally related and share a common co-receptor gpi 30 which mediates intracellular signal transduction by cytoplasmic tyrosine kinases such as src.

[0108] Novel proteins related to this family are also likely to be secreted, to activate gp 130 and to function in the development of a variety of cell types. Thus new members of this family would be candidates to be developed as growth or survival factors for the cell types that they stimulate. For more details on this family of cytokines, see Pennica et al, Cytokine and Growth Factor Reviews (1996) 7:81-91. U.S. Pat. No. 5,420,247 discloses LIF receptor and fusion proteins. U.S. Pat. No. 5,443,825 discloses human LIF.

[0109] Angiopoietin.

[0110] Angiopoietin-1 is a secreted ligand of the TIE-2 tyrosine kinase; it functions as an angiogenic factor critical for normal vascular development. Angiopoietin-2 is a natural antagonist of angiopoietin-1 and thus functions as an anti-angiogenic factor. These two proteins are structurally similar and activate the same receptor (Folkman et al., Cell (1996) 87:1153, and Davis et al., Cell (1996) 87:1161). The angiopoietin molecules are composed of two domains: a coiled-coil region and a region related to fibrinogen. The fibrinogen domain is found in many molecules including ficolin and tesascin, and is well defined structurally with many members.

[0111] Receptor Protein-Tyrosine Kinases.

[0112] Receptor Protein-Tyrosine Kinases or RPTKs are described in Lindberg, Annu. Rev. Cell Biol. (1994) 10:251-337.

[0113] Growth Factors: (Epidermal Growth Factor) EGF and (Fibroblast Growth Factor) FGF.

[0114] For a discussion of growth factor superfamilies, see Growth Factors: A Practical Approach, (Appendix A1) (1993) McKay and Leigh, Oxford University Press, NY, 237-243. U.S. Pat. No. 4,444,760 discloses acidic brain fibroblast growth factor, which is active in the promotion of cell division and wound healing. U.S. Pat. No. 5,439,818 discloses DNA encoding human recombinant basic fibroblast growth factor, which is active in wound healing. U.S. Pat. No. 5,604,293 discloses recombinant human basic fibroblast growth factor, which is useful for wound healing. U.S. Pat. No. 5,410,832 discloses brain-derived and recombinant acidic fibroblast growth factor, which act as mitogens for mesoderm and neuroectoderm-derived cells in culture, and promote wound healing in soft tissue, cartilaginous tissue and musculo-skeletal tissue. U.S. Pat. No. 5,387,673 discloses biologically active fragments of FGF.

[0115] Proteins of the TNF Family.

[0116] A profile derived from the TNF family is created by aligning sequences of the following TNF family members: nerve growth factor (NGF), lymphotoxin, Fas ligand, tumor necrosis factor (TNFα), CD40 ligand, TRAIL, ox40 ligand, 4-1BB ligand, CD27 ligand, and CD30 ligand. The profile is designed to identify sequences of proteins that constitute new members or homologues of this family of proteins. U.S. Pat. No. 5,606,023 discloses mutant TNF proteins; U.S. Pat. No. 5,597,899 and U.S. Pat. No. 5,486,463 disclose TNF muteins; and U.S. Pat. No. 5,652,353 discloses DNA encoding TNFα muteins.

[0117] Members of the TNF family of proteins have been show in vitro to multimerize, as described in Burrows et al., Biochem. (1994) 33:12741 and Zhang et al., Mol. Cell. Biol. (1995) 15:4851 and bind receptors as described in Browning et al., J. Immunol. (1994) 147:1230, Androlewicz et al., J. Biol. Chem.(1992) 267:2542, and Crowe et al., Science (1994) 264:707.

[0118] In vivo, TNFs proteolytically cleave a target protein as described in Kriegel et al., Cell (1988) 53:45 and Mohler et al., Nature (1994) 370:218 and demonstrate cell proliferation and differentiation activity. T-cell or thymocyte proliferation is assayed as described in Armitage et al., Eur. J. Immunol. (1992) 22:447; Current Protocols in Immunology, ed. J. E. Coligan et al., 3.1-3.19; Takai et al., J. Immunol. (1986)137:3494-3500, Bertagnoli et al., J. Immunol. (1990) 145:1706, Bertagnoli et al., J. Immunol. (1991) 133:327, Bertagnoli et al., J. Immunol. (1992) 149:3778, and Bowman et al., J. Immunol. (1994) 152:1756. B cell proliferation and Ig secretion are assayed as described in Maliszewski, J. Immunol. (1990) 144:3028, and Assays for B Cell Function: In Vitro Antibody Production, Mond and Brunswick, Current Protocols in Immunol., Coligan Ed vol 1 pp 3.8.1-3.8.16, John Wiley and Sons, Toronto 1994, Kehrl et al., Science (1987)238:1144 and Boussiotis et al., PNAS USA (1994) 91:7007. Other in vivo activities include upregulation of cell surface antigens, upregulation of costimulatory molecules, and cellular aggregation/adhesion as described in Barrett et al., J. Immunol. (1 991) 146:1722; Bjorck et al., Eur. J. Immunol. (i 993) 23:1771; Clark et al., Annu Rev. Immunol. (1 991) 9:97; Ranheim et al., J. Exp. Med. (1994) 177:925; Yellin, J. Immunol. (1994) 153:666; and Gruss et al., Blood (1994) 84:2305.

[0119] Proliferation and differentiation of hematopoietic and lymphopoietic cells has also been shown in vivo for TNFs, using assays for embryonic differentiation and hematopoiesis as described in Johansson et al., Cellular Biology (1995) 15:141, Keller et al., Mol. Cell. Biol. (1993) 13:473, McClanahan et al., Blood (1993) 81:2903 and using assays to detect stem cell survival and differentiation as described in Culture of Hematopoietic Cells, Freshney et al. eds, pp 1-21, 23-29, 139-162, 163-179, and 265-268, Wiley-Liss, Inc., New York, N.Y., 1994, and Hirajama et al., PNAS USA (1992) 89:5907.

[0120] In vivo activities of TNFs also include lymphocyte survival and apoptosis, assayed as described in Darzynkewicz et al., Cytometry (1992) 13:795; Gorczca et al., Leukemia (1993) 7:659; Itoh et al., Cell (1991) 66:233; Zacharduk, J. Immunol. (1990) 145:4037; Zamai et al., Cytometry (1993) 14:891; and Gorczyca et al., Int'l J. Oncol. (1992) 1:639. Some members of the TNF family are cleaved from the cell surface; others remain membrane bound. The three-dimensional structure of TNF is discussed in Sprang and Eck, Tumor Necrosis Factors; supra.

[0121] TNF proteins include a transmembrane domain. The protein is cleaved into a shorter soluble version, as described in Kriegler et al., Cell (1988) 53:45, Perez et al., Cell (1990) 63:251, and Shaw et al., Cell (1986) 46:659. The transmembrane domain is between amino acid 46 and 77 and the cytoplasmic domain is between position 1 and 45 on the human form of TNFα. The 3-dimensional motifs of TNF include a sandwich of two pleated β sheets. Each sheet is composed of anti-parallel β strands. β strands facing each other on opposite sites of the sandwich are connected by short polypeptide loops, as described in Van Ostade et al., Protein Engineering (1994) 7(1):5, and Sprang et al., Tumor Necrosis Factors; supra. Residues of the TNF family proteins that are involved in the β sheet secondary structure have been identified as described in Van Ostade et al., Protein Eng. (1994) 7(1):5, and Sprang et al., supra.

[0122] TNF receptors are disclosed in U.S. Pat. No. 5,395,760. A profile derived from the TNF receptor family is created by aligning sequences of the TNF receptor family, including Apo1/Fas, TNFR I and II, death receptor 3 (DR3), CD40, ox40, CD27, and CD30. Thus, the profile is designed to identify from the polynucleotides of the invention sequences of proteins that constitute new members or homologues of this family of proteins.

[0123] Tumor necrosis factor receptors exist in two forms in humans: p55 TNFR and p75 TNFR, both of which provide intracellular signals upon binding with a ligand. The extracellular domains of these receptor proteins are cysteine rich. The receptors can remain membrane bound, although some forms of the receptors are cleaved forming soluble receptors. The regulation, diagnostic, prognostic, and therapeutic value of soluble TNF receptors is discussed in Aderka, Cytokine and Growth Factor Reviews, (1996) 7(3):231.

[0124] PDGF Family.

[0125] U.S. Pat. No. 5,326,695 discloses platelet derived growth factor agonists; bioactive portions of PDGF-B are used as agonists. U.S. Pat. No. 4,845,075 discloses biologically active B-chain homodimers, and also includes variants and derivatives of the PDGF-B chain. U.S. Pat. No. 5,128,321 discloses PDGF analogs and methods of use. Proteins having the same bioactivity as PDGF are disclosed, including A and B chain proteins.

[0126] Kinase (Including MKK) Family.

[0127] U.S. Pat. No. 5,650,501 discloses serine/threonine kinase, associated with mitotic and meiotic cell division; the protein has a kinase domain in its N-terminal and 3 PEST regions in the C-terminus. U.S. Pat. No. 5,605,825 discloses human PAK65, a serine protein kinase.

[0128] The foregoing discussion provides a few examples of the protein profiles that can be compared with the polynucleotides of the invention. One skilled in the art can use these and other protein profiles to identify the genes that correlate with the provided polynucleotides.

[0129] C. Identification of Secreted & Membrane-Bound Polypeptides

[0130] Both secreted and membrane-bound polypeptides of the present invention are of particular interest. For example, levels of secreted polypeptides can be assayed in body fluids that are convenient, such as blood, urine, prostatic fluid and semen. Membrane-bound polypeptides are useful for constructing vaccine antigens or inducing an immune response. Such antigens would comprise all or part of the extracellular region of the membrane-bound polypeptides. Because both secreted and membrane-bound polypeptides comprise a fragment of contiguous hydrophobic amino acids, hydrophobicity predicting algorithms can be used to identify such polypeptides.

[0131] A signal sequence is usually encoded by both secreted and membrane-bound polypeptide genes to direct a polypeptide to the surface of the cell. The signal sequence usually comprises a stretch of hydrophobic residues. Such signal sequences can fold into helical structures. Membrane-bound polypeptides typically comprise at least one transmembrane region that possesses a stretch of hydrophobic amino acids that can transverse the membrane. Some transmembrane regions also exhibit a helical structure. Hydrophobic fragments within a polypeptide can be identified by using computer algorithms. Such algorithms include Hopp & Woods, Proc. Natl. Acad. Sci. USA (1981) 78:3824-3828; Kyte & Doolittle, J. Mol. Biol. (1982) 157: 105-132; and RAOAR algorithm, Degli Esposti et al., Eur. J. Biochem. (1990)190: 207-219.

[0132] Another method of identifying secreted and membrane-bound polypeptides is to translate the polynucleotides of the invention in all six frames and determine if at least 8 contiguous hydrophobic amino acids are present. Those translated polypeptides with at least 8; more typically, 10; even more typically, 12 contiguous hydrophobic amino acids are considered to be either a putative secreted or membrane bound polypeptide. Hydrophobic amino acids include alanine, glycine, histidine, isoleucine, leucine, lysine, methionine, phenylalanine, proline, threonine, tryptophan, tyrosine, and valine.

[0133] IV. Identification of the Function of an Expression Product of a Full-Length Gene Corresponding to a Polynucleotide

[0134] Ribozymes, antisense constructs, and dominant negative mutants can be used to determine function of the expression product of a gene corresponding to a polynucleotide provided herein. These methods and compositions are particularly useflul where the provided novel polynucleotide exhibits no significant or substantial homology to a sequence encoding a gene of known function. Antisense molecules and ribozymes can be constructed from synthetic polynucleotides. Typically, the phosphoramidite method of oligonucleotide synthesis is used. See Beaucage et al., Tet. Lett. (1981) 22:1859 and U.S. Pat. No. 4,668,777. Automated devices for synthesis are available to create oligonucleotides using this chemistry. Examples of such devices include Biosearch 8600, Models 392 and 394 by Applied Biosystems, a division of Perkin-Elmer Corp., Foster City, Calif., USA; and Expedite by Perceptive Biosystems, Framingham, Mass., USA. Synthetic RNA, phosphate analog oligonucleotides, and chemically derivatized oligonucleotides can also be produced, and can be covalently attached to other molecules. RNA oligonucleotides can be synthesized, for example, using RNA phosphoramidites. This method can be performed on an automated synthesizer, such as Applied Biosystems, Models 392 and 394, Foster City, Calif., USA. See Applied Biosystems User Bulletin 53 and Ogilvie et al., Pure & Applied Chem. (1987) 59:325.

[0135] Phosphorothioate oligonucleotides can also be synthesized for antisense construction. A sulfurizing reagent, such as tetraethylthiruam disulfide (TETD) in acetonitrile can be used to convert the internucleotide cyanoethyl phosphite to the phosphorothioate triester within 15 minutes at room temperature. TETD replaces the iodine reagent, while all other reagents used for standard phosphoramidite chemistry remain the same. Such a synthesis method can be automated using Models 392 and 394 by Applied Biosystems, for example.

[0136] Oligonucleotides of up to 200 nucleotides can be synthesized, more typically, 100 nucleotides, more typically 50 nucleotides; even more typically 30 to 40 nucleotides. These synthetic fragments can be annealed and ligated together to construct larger fragments. See, for example, Sambrook et al., supra.

[0137] A. Ribozymes

[0138] Trans-cleaving catalytic RNAs (ribozymes) are RNA molecules possessing endoribonuclease activity. Ribozymes are specifically designed for a particular target, and the target message must contain a specific nucleotide sequence. They are engineered to cleave any RNA species site-specifically in the background of cellular RNA. The cleavage event renders the mRNA unstable and prevents protein expression. Importantly, ribozymes can be used to inhibit expression of a gene of unknown function for the purpose of determining its function in an in vitro or in vivo context, by detecting the phenotypic effect.

[0139] One commonly used ribozyme motif is the hammerhead, for which the substrate sequence requirements are minimal. Design of the hammerhead ribozyme is disclosed in Usman et al., Current Opin. Struct. Biol. (1996) 6:527. Usman also discusses the therapeutic uses of ribozymes. Ribozymes can also be prepared and used as described in Long et al., FASEB J. (1993) 7:25; Symons, Ann. Rev. Biochem. (1992) 61:641; Perrotta et al., Biochem. (1992) 31:16; Ojwang et al., Proc. Natl. Acad. Sci. (USA) (1992) 89:10802; and U.S. Pat. No. 5,254,678. Ribozyme cleavage of HIV-I RNA is described in U.S. Pat. No. 5,144,019; methods of cleaving RNA using ribozymes is described in U.S. Pat. No. 5,116,742; and methods for increasing the specificity of ribozymes are described in U.S. Pat. No. 5,225,337 and Koizumi et al., Nucleic Acid Res. (1989) 17:7059. Preparation and use of ribozyme fragments in a hammerhead structure are also described by Koizumi et al., Nucleic Acids Res. (1989) 17:7059. Preparation and use of ribozyme fragments in a hairpin structure are described by Chowrira and Burke, Nucleic Acids Res. (1992) 20:2835. Ribozymes can also be made by rolling transcription as described in Daubendiek and Kool, Nat. Biotechnol. (1997) 15(3):273.

[0140] The hybridizing region of the ribozyme can be modified or can be prepared as a branched structure as described in Horn and Urdea, Nucleic Acids Res. (1989) 17:6959. The basic structure of the ribozymes can also be chemically altered in ways familiar to those skilled in the art, and chemically synthesized ribozymes can be administered as synthetic oligonucleotide derivatives modified by monomeric units. In a therapeutic context, liposome mediated delivery of ribozymes improves cellular uptake, as described in Birikh et al., Eur. J. Biochem. (1997) 245:1.

[0141] Using the polynucleotide sequences of the invention and methods known in the art, ribozymes are designed to specifically bind and cut the corresponding mRNA species. Ribozymes thus provide a means to inihibit the expression of any of the proteins encoded by the disclosed polynucleotides or their full-length genes. The full-length gene need not be known in order to design and use specific inhibitory ribozymes. In the case of a polynucleotide or full-length cDNA of unknown function, ribozymes corresponding to that nucleotide sequence can be tested in vitro for efficacy in cleaving the target transcript. Those ribozymes that effect cleavage in vitro are further tested in vivo. The ribozyme can also be used to generate an animal model for a disease, as described in Birikh et al., supra. An effective ribozyme is used to determine the function of the gene of interest by blocking its transcription and detecting a change in the cell. Where the gene is found to be a mediator in a disease, an effective ribozyme is designed and delivered in a gene therapy for blocking transcription and expression of the gene.

[0142] Therapeutic and functional genomic applications of ribozymes proceed beginning with knowledge of a portion of the coding sequence of the gene to be inhibited. Thus, for many genes, a partial polynucleotide sequence provides adequate sequence for constructing an effective ribozyme. A target cleavage site is selected in the target sequence, and a ribozyme is constructed based on the 5′ and 3′ nucleotide sequences that flank the cleavage site. Retroviral vectors are engineered to express monomeric and multimeric hammerhead ribozymes targeting the mRNA of the target coding sequence. These monomeric and multimeric ribozymes are tested in vitro for an ability to cleave the target mRNA. A cell line is stably transduced with the retroviral vectors expressing the ribozymes, and the transduction is confirmed by Northern blot analysis and reverse-transcription polymerase chain reaction (RT-PCR). The cells are screened for inactivation of the target mRNA by such indicators as reduction of expression of disease markers or reduction of the gene product of the target mRNA.

[0143] B. Antisense

[0144] Antisense nucleic acids are designed to specifically bind to RNA, resulting in the formation of RNA-DNA or RNA-RNA hybrids, with an arrest of DNA replication, reverse transcription or messenger RNA translation. Antisense polynucleotides based on a selected polynucleotide sequence can interfere with expression of the corresponding gene. Antisense polynucleotides are typically generated within the cell by expression from antisense constructs that contain the antisense strand as the transcribed strand. Antisense polynucleotides based on the disclosed polynucleotides will bind and/or interfere with the translation of mRNA comprising a sequence complementary to the antisense polynucleotide. The expression products of control cells and cells treated with the antisense construct are compared to detect the protein product of the gene corresponding to the polynucleotide upon which the antisense construct is based. The protein is isolated and identified using routine biochemical methods.

[0145] One rationale for using antisense methods to determine the function of the gene corresponding to a disclosed polynucleotide is the biological activity of antisense therapeutics. Antisense therapy for a variety of cancers is in clinical phase and has been discussed extensively in the literature. Reed reviewed antisense therapy directed at the Bcl-2 gene in tumors; gene transfer-mediated overexpression of Bcl-2 in tumor cell lines conferred resistance to many types of cancer drugs. (Reed, J. C., N.C.I. (1997) 89:988). The potential for clinical development of antisense inhibitors of ras is discussed by Cowsert, L. M., Anti-Cancer Drug Design (1997) 12:359. Additional important antisense targets include leukemia (Geurtz, A. M., Anti-Cancer Drug Design (1997) 12:341); human C-ref kinase (Monia, B. P., Anti-Cancer Drug Design (1997) 12:327); and protein kinase C (McGraw et al., Anti-Cancer Drug Design (1997) 12:315.

[0146] Given the extensive background literature and clinical experience in antisense therapy, one skilled in the art can use selected polynucleotides of the invention as additional potential therapeutics. The choice of polynucleotide can be narrowed by first testing them for binding to “hot spot” regions of the genome of cancerous cells. If a polynucleotide is identified as binding to a “hot spot”, testing the polynucleotide as an antisense compound in the corresponding cancer cells clearly is warranted.

[0147] Ogunbiyi et al., Gastroenterology (1997) 113(3):761 describe prognostic use of allelic loss in colon cancer; Barks et al., Genes, Chromosomes, and Cancer (1997) 19(4):278 describe increased chromosome copy number detected by FISH in malignant melanoma; Nishizake et al., Genes, Chromosomes, and Cancer (1997) 19(4):267 describe genetic alterations in primary breast cancer and their metastases and direct comparison using modified comparative genome hybridization; and Elo et al., Cancer Research (1997) 57(16):3356 disclose that loss of heterozygosity at 16z24.1-q24.2 is significantly associated with metastatic and aggressive behavior of prostate cancer.

[0148] C. Dominant Negative Mutations

[0149] As an alternative method for identifying function of the gene corresponding to a polynucleotide disclosed herein, dominant negative mutations are readily generated for corresponding proteins that are active as homomultimers. A mutant polypeptide will interact with wild-type polypeptides (made from the other allele) and form a non-functional multimer. Thus, a mutation is in a substrate-binding domain, a catalytic domain, or a cellular localization domain. Preferably, the mutant polypeptide will be overproduced. Point mutations are made that have such an effect. In addition, fusion of different polypeptides of various lengths to the terminus of a protein can yield dominant negative mutants. General strategies are available for making dominant negative mutants (see, e.g., Herskowitz, Nature (1987) 329:219). Such techniques can be used to create loss of function mutations, which are useful for determining protein function.

[0150] V. Construction of Polypeptides of the Invention and Variants Thereof

[0151] The polypeptides of the invention include those encoded by the disclosed polynucleotides. These polypeptides can also be encoded by nucleic acids that, by virtue of the degeneracy of the genetic code, are not identical in sequence to the disclosed polynucleotides. Thus, the invention includes within its scope a polypeptide encoded by a polynucleotide having the sequence of any one of SEQ ID NOS: 1-844 or a variant thereof.

[0152] In general, the term “polypeptide” as used herein refers to both the full length polypeptide encoded by the recited polynucleotide, the polypeptide encoded by the gene represented by the recited polynucleotide, as well as portions or fragments thereof. “Polypeptides” also includes variants of the naturally occurring proteins, where such variants are homologous or substantially similar to the naturally occurring protein, and can be of an origin of the same or different species as the naturally occurring protein (e.g., human, murine, or some other species that naturally expresses the recited polypeptide, usually a mammalian species). In general, variant polypeptides have a sequence that has at least about 80%, usually at least about 90%, and more usually at least about 98% sequence identity with a differentially expressed polypeptide of the invention, as measured by BLAST using the parameters described above. The variant polypeptides can be naturally or non-naturally glycosylated, i.e., the polypeptide has a glycosylation pattern that differs from the glycosylation pattern found in the corresponding naturally occurring protein.

[0153] The invention also encompasses homologs of the disclosed polypeptides (or fragments thereof) where the homologs are isolated from other species, i.e. other animal or plant species, where such homologs, usually mammalian species, e.g. rodents, such as mice, rats; domestic animals, e.g., horse, cow, dog, cat; and humans. By homolog is meant a polypeptide having at least about 35%, usually at least about 40% and more usually at least about 60% amino acid sequence identity a particular differentially expressed protein as identified above, where sequence identity is determined using the BLAST algorithm, with the parameters described supra.

[0154] In general, the polypeptides of the subject invention are provided in a non-naturally occurring environment, e.g. are separated from their naturally occurring environment. In certain embodiments, the subject protein is present in a composition that is enriched for the protein as compared to a control. As such, purified polypeptide is provided, where by purified is meant that the protein is present in a composition that is substantially free of non-differentially expressed polypeptides, where by substantially free is meant that less than 90%, usually less than 60% and more usually less than 50% of the composition is made up of non-differentially expressed polypeptides.

[0155] Also within the scope of the invention are variants; variants of polypeptides include mutants, fragments, and fusions. Mutants can include amino acid substitutions, additions or deletions. The amino acid substitutions can be conservative amino acid substitutions or substitutions to eliminate non-essential amino acids, such as to alter a glycosylation site, a phosphorylation site or an acetylation site, or to minimize misfolding by substitution or deletion of one or more cysteine residues that are not necessary for function. Conservative amino acid substitutions are those that preserve the general charge, hydrophobicity/hydrophilicity, and/or steric bulk of the amino acid substituted. For example, substitutions between the following groups are conservative: Gly/Ala, Val/Ile/Leu, Asp/Glu, Lys/Arg, Asn/Gln, Ser/Cys, Thr, and Phe/Trp/Tyr.

[0156] Variants can be designed so as to retain biological activity of a particular region of the protein (e.g., a functional domain and/or, where the polypeptide is a member of a protein family, a region associated with a consensus sequence). In a non-limiting example, Osawa et al., Biochem. Mol. Int. (1994) 34:1003, discusses the actin binding region of a protein from several different species. The actin binding regions of the these species are considered homologous based on the fact that they have amino acids that fall within “homologous residue groups.” Homologous residues are judged according to the following groups (using single letter amino acid designations): STAG; ILVMF; HRK; DEQN; and FYW. For example, and S, a T, an A or a G can be in a position and the function (in this case actin binding) is retained.

[0157] Additional guidance on amino acid substitution is available from studies of protein evolution. Go et al, Int. J. Peptide Protein Res. (1980) 15:211, classified amino acid residue sites as interior or exterior depending on their accessibility. More frequent substitution on exterior sites was confirmed to be general in eight sets of homologous protein families regardless of their biological functions and the presence or absence of a prosthetic group. Virtually all types of amino acid residues had higher mutabilities on the exterior than in the interior. No correlation between mutability and polarity was observed of amino acid residues in the interior and exterior, respectively. Amino acid residues were classified into one of three groups depending on their polarity: polar (Arg, Lys, His, Gln, Asn, Asp, and Glu); weak polar (Ala, Pro, Gly, Thr, and Ser), and nonpolar (Cys, Val, Met, Ile, Leu, Phe, Tyr, and Trp). Amino acid replacements during protein evolution were very conservative: 88% and 76% of them in the interior or exterior, respectively, were within the same group of the three. Inter-group replacements are such that weak polar residues are replaced more often by nonpolar residues in the interior and more often by polar residues on the exterior.

[0158] Additional guidance for production of polypeptide variants is provided in Querol et al., Prot. Eng. (1996) 9:265, which provides general rules for amino acid substitutions to enhance protein thermostability. New glycosylation sites can be introduced as discussed in Olsen and Thomsen, J. Gen. Microbiol. (1991) 137:579. An additional disulfide bridge can be introduced, as discussed by Perry and Wetzel, Science (1984) 226:555; Pantoliano et al., Biochemistry (1987) 26:2077; Matsumura et al., Nature (1989) 342:291; Nishikawa et al., Protein Eng. (1990) 3:443; Takagi et al., J. Biol. Chem. (1990) 265:6874; Clarke et al., Biochemistry (1993) 32:4322; and Wakarchuk et al., Protein Eng. (1994) 7:1379. Metal binding sites can be introduced, according to Toma et al., Biochemistry (1991) 30:97, and Haezerbrouck et al., Protein Eng. (1993) 6:643. Substitutions with prolines in loops can be made according to Masul et al., Appl. Env. Microbiol. (1994) 60:3579; and Hardy et al., FEBS Lett. 317:89.

[0159] Cysteine-depleted muteins are considered variants within the scope of the invention. These variants can be constructed according to methods disclosed in U.S. Pat. No. 4,959,314, which discloses substitution of cysteines with other amino acids, and methods for assaying biological activity and effect of the substitution. Such methods are suitable for proteins according to this invention that have cysteine residues suitable for such substitutions, for example to eliminate disulfide bond formation.

[0160] Variants also include fragments of the polypeptides disclosed herein, particularly biologically active fragments and/or fragments corresponding to functional domains. Fragments of interest will typically be at least about 10 aa to at least about 15 aa in length, usually at least about 50 aa in length, and can be as long as 300 aa in length or longer, but will usually not exceed about 1000 aa in length, where the fragment will have a stretch of amino acids that is identical to a polypeptide encoded by a polynucleotide having a sequence of any SEQ ID NOS:1-844, or a homolog thereof.

[0161] The protein variants described herein are encoded by polynucleotides that are within the scope of the invention. The genetic code can be used to select the appropriate codons to construct the corresponding variants.

[0162] VI. Computer-Related Embodiments

[0163] In general, a library of polynucleotides is a collection of sequence information, which information is provided in either biochemical form (e.g., as a collection of polynucleotide molecules), or in electronic form (e.g., as a collection of polynucleotide sequences stored in a computer-readable form, as in a computer system and/or as part of a computer program). The sequence information of the polynucleotides can be used in a variety of ways, e.g., as a resource for gene discovery, as a representation of sequences expressed in a selected cell type (e.g., cell type markers), and/or as markers of a given disease or disease state. In general, a disease marker is a representation of a gene product that is present in all affected by disease either at an increased or decreased level relative to a normal cell (e.g., a cell of the same or similar type that is not substantially affected by disease). For example, a polynucleotide sequence in a library can be a polynucleotide that represents an mRNA, polypeptide, or other gene product encoded by the polynucleotide, that is either overexpressed or underexpressed in a breast ductal cell affected by cancer relative to a normal (i.e., substantially disease-free) breast cell.

[0164] The nucleotide sequence information of the library can be embodied in any suitable form, e.g., electronic or biochemical forms. For example, a library of sequence information embodied in electronic form includes an accessible computer data file (or, in biochemical form, a collection of nucleic acid molecules) that contains the representative nucleotide sequences of genes that are differentially expressed (e.g., overexpressed or underexpressed) as between, for example, i) a cancerous cell and a normal cell; ii) a cancerous cell and a dysplastic cell; iii) a cancerous cell and a cell affected by a disease or condition other than cancer; iv) a metastatic cancerous cell and a normal cell and/or non-metastatic cancerous cell; v) a malignant cancerous cell and a non-malignant cancerous cell (or a normal cell) and/or vi) a dysplastic cell relative to a normal cell. Other combinations and comparisons of cells affected by various diseases or stages of disease will be readily apparent to the ordinarily skilled artisan. Biochemical embodiments of the library include a collection of nucleic acids that have the sequences of the genes in the library, where the nucleic acids can correspond to the entire gene in the library or to a fragment thereof, as described in greater detail below.

[0165] The polynucleotide libraries of the subject invention include sequence information of a plurality of polynucleotide sequences, where at least one of the polynucleotides has a sequence of any of SEQ ID NOS :1-844. By plurality is meant at least 2, usually at least 3 and can include up to all of SEQ ID NOS:1-844. The length and number of polynucleotides in the library will vary with the nature of the library, e.g., if the library is an oligonucleotide array, a cDNA array, a computer database of the sequence information, etc.

[0166] Where the library is an electronic library, the nucleic acid sequence information can be present in a variety of media. “Media” refers to a manufacture, other than an isolated nucleic acid molecule, that contains the sequence information of the present invention. Such a manufacture provides the genome sequence or a subset thereof in a form that can be examined by means not directly applicable to the sequence as it exists in a nucleic acid. For example, the nucleotide sequence of the present invention, e.g. the nucleic acid sequences of any of the polynucleotides of SEQ ID NOS:1-844, can be recorded on computer readable media, e.g. any medium that can be read and accessed directly by a computer. Such media include, but are not limited to: magnetic storage media, such as a floppy disc, a hard disc storage medium, and a magnetic tape; optical storage media such as CD-ROM; electrical storage media such as RAM and ROM; and hybrids of these categories such as magnetic/optical storage media. One of skill in the art can readily appreciate how any of the presently known computer readable mediums can be used to create a manufacture comprising a recording of the present sequence information. “Recorded” refers to a process for storing information on computer readable medium, using any such methods as known in the art. Any convenient data storage structure can be chosen, based on the means used to access the stored information. A variety of data processor programs and formats can be used for storage, e.g. word processing text file, database format, etc. In addition to the sequence information, electronic versions of the libraries of the invention can be provided in conjunction or connection with other computer-readable information and/or other types of computer-readable files (e.g., searchable files, executable files, etc, including, but not limited to, for example, search program software, etc.).

[0167] By providing the nucleotide sequence in computer readable form, the information can be accessed for a variety of purposes. Computer software to access sequence information is publicly available. For example, the BLAST (Altschul et al., supra.) and BLAZE (Brutlag et al. Comp. Chem. (1993) 17:203) search algorithms on a Sybase system can be used identify open reading frames (ORFs) within the genome that contain homology to ORFs from other organisms.

[0168] As used herein, “a computer-based system” refers to the hardware means, software means, and data storage means used to analyze the nucleotide sequence information of the present invention. The minimum hardware of the computer-based systems of the present invention comprises a central processing unit (CPU), input means, output means, and data storage means. A skilled artisan can readily appreciate that any one of the currently available computer-based system are suitable for use in the present invention. The data storage means can comprise any manufacture comprising a recording of the present sequence information as described above, or a memory access means that can access such a manufacture.

[0169] “Search means” refers to one or more programs implemented on the computer-based system, to compare a target sequence or target structural motif with the stored sequence information. Search means are used to identify fragments or regions of the genome that match a particular target sequence or target motif. A variety of known algorithms are publicly known and commercially available, e.g. MacPattern (EMBL), BLASTN and BLASTX (NCBI). A “target sequence” can be any DNA or amino acid sequence of six or more nucleotides or two or more amino acids, preferably from about 10 to 100 amino acids or from about 30 to 300 nucleotide residues.

[0170] A “target structural motif,” or “target motif,” refers to any rationally selected sequence or combination of sequences in which the sequence(s) are chosen based on a three-dimensional configuration that is formed upon the folding of the target motif, or on consensus sequences of regulatory or active sites. There are a variety of target motifs known in the art. Protein target motifs include, but arc not limited to, enzyme active sites and signal sequences. Nucleic acid target motifs include, but are not limited to, hairpin structures, promoter sequences and other expression elements such as binding sites for transcription factors.

[0171] A variety of structural formats for the input and output means can be used to input and output the information in the computer-based systems of the present invention. One format for an output means ranks fragments of the genome possessing varying degrees of homology to a target sequence or target motif. Such presentation provides a skilled artisan with a ranking of sequences and identifies the degree of sequence similarity contained in the identified fragment.

[0172] A variety of comparing means can be used to compare a target sequence or target motif with the data storage means to identify sequence fragments of the genome. A skilled artisan can readily recognize that any one of the publicly available homology search programs can be used as the search means for the computer based systems of the present invention.

[0173] As discussed above, the “library” of the invention also encompasses biochemical libraries of the polynucleotides of SEQ ID NOS:1-844, e.g., collections of nucleic acids representing the provided polynucleotides. The biochemical libraries can take a variety of forms, e.g., a solution of cDNAs, a pattern of probe nucleic acids stably associated with a surface of a solid support (i.e., an array) and the like. Of particular interest are nucleic acid arrays in which one or more of SEQ ID NOS:1-844 is represented on the array. By array is meant a an article of manufacture that has at least a substrate with at least two distinct nucleic acid targets on one of its surfaces, where the number of distinct nucleic acids can be considerably higher, typically being at least 10 nt, usually at least 20 nt and often at least 25 nt. A variety of different array formats have been developed and are known to those of skill in the art, including those described in U.S. Pat. Nos. 5,242,974; 5,384,261; 5,405,783; 5,412,087; 5,424,186; 5,429,807; 5,436,327; 5,445,934; 5,472,672; 5,527,681; 5,529,756; 5,545,531; 5,554,501; 5,556,752; 5,561,071; 5,599,895; 5,624,711; 5,639,603; 5,658,734; WO 93/17126; WO 95/11995; WO 95/35505; EP 742287; and EP 799897. The arrays of the subject invention find use in a variety of applications, including gene expression analysis, drug screening, mutation analysis and the like, as disclosed in the above-listed exemplary patent documents.

[0174] In addition to the above nucleic acid libraries, analogous libraries of polypeptides are also provided, where the where the polypeptides of the library will represent at least a portion of the polypeptides encoded by SEQ ID NOS:1-844.

[0175] VII. Utilities

[0176] A. Use of Polynucleotide Probes in Mapping, and in Tissue Profiling

[0177] Polynucleotide probes, generally comprising at least 12 contiguous nucleotides of a polynucleotide as shown in the Sequence Listing, are used for a variety of purposes, such as chromosome mapping of the polynucleotide and detection of transcription levels. Additional disclosure about preferred regions of the disclosed polynucleotide sequences is found in the Examples. A probe that hybridizes specifically to a polynucleotide disclosed herein should provide a detection signal at least 5-, 10-, or 20-fold higher than the background hybridization provided with other unrelated sequences.

[0178] Probes in Detection of Expression Levels.

[0179] Nucleotide probes are used to detect expression of a gene corresponding to the provided polynucleotide. The references describe an example of a sandwich nucleotide hybridization assay. For example, in Northern blots, mRNA is separated electrophoretically and contacted with a probe. A probe is detected as hybridizing to an mRNA species of a particular size. The amount of hybridization is quantitated to determine relative amounts of expression, for example under a particular condition. Probes are also used to detect products of amplification by polymerase chain reaction. The products of the reaction are hybridized to the probe and hybrids are detected. Probes are used for in situ hybridization to cells to detect expression. Probes can also be used in vivo for diagnostic detection of hybridizing sequences. Probes are typically labeled with a radioactive isotope. Other types of detectable labels can be used such as chromophores, fluors, and enzymes. Other examples of nucleotide hybridization assays are described in WO92/02526 and U.S. Pat. No. 5,124,246.

[0180] Alternatively, the Polymerase Chain Reaction (PCR) is another means for detecting small amounts of target nucleic acids (see, e.g., Mullis et al., Meth. Enzymol. (1987) 155:335; U.S. Pat. No. 4,683,195; and U.S. Pat. No. 4,683,202). Two primer polynucleotides nucleotides hybridize with the target nucleic acids and are used to prime the reaction. The primers can be composed of sequence within or 3′ and 5′ to the polynucleotides of the Sequence Listing. Alternatively, if the primers are 3′ and 5′ to these polynucleotides, they need not hybridize to them or the complements. A thermostable polymerase creates copies of target nucleic acids from the primers using the original target nucleic acids as a template. After a large amount of target nucleic acids is generated by the polymerase, it is detected by methods such as Southern blots. When using the Southern blot method, the labeled probe will hybridize to a polynucleotide of the Sequence Listing or complement.

[0181] Furthermore, mRNA or cDNA can be detected by traditional blotting techniques described in Sambrook et al., “Molecular Cloning: A Laboratory Manual” (New York, Cold Spring Harbor Laboratory, 1989). mRNA or cDNA generated from mRNA using a polymerase enzyme can be purified and separated using gel electrophoresis. The nucleic acids on the gel are then blotted onto a solid support, such as nitrocellulose. The solid support is exposed to a labeled probe and then washed to remove any unhybridized probe. Next, the duplexes containing the labeled probe are detected. Typically, the probe is labeled with radioactivity.

[0182] Mapping.

[0183] Polynucleotides of the present invention are used to identify a chromosome on which the corresponding gene resides. Such mapping can be useful in identifying the function of the polynucleotide-related gene by its proximity to other genes with known function. Function can also be assigned to the polynucleotide-related gene when particular syndromes or diseases map to the same chromosome. For example, use of polynucleotide probes in identification and quantification of nucleic acid sequence aberrations is described in U.S. Pat. No. 5,783,387.

[0184] For example, fluorescence in situ hybridization (FISH) on normal metaphase spreads facilitates comparative genomic hybridization to allow total genome assessment of changes in relative copy number of DNA sequences. See Schwartz and Samad, Curr. Opin. Biotechnol. (1994) 8:70; Kallioniemi et al., Sem. Cancer Biol. (1993) 4:41; Valdes et al., Methods in Molecular Biology (1997) 68: 1, Boultwood, ed., Human Press, Totowa, N.J. Preparations of human metaphase chromosomes are prepared using standard cytogenetic techniques from human primary tissues or cell lines. Nucleotide probes comprising at least 12 contiguous nucleotides selected from the nucleotide sequence shown in the Sequence Listing are used to identify the corresponding chromosome. The nucleotide probes are labeled, for example, with a radioactive, fluorescent, biotinylated, or chemiluminescent label, and detected by well known methods appropriate for the particular label selected. Protocols for hybridizing nucleotide probes to preparations of metaphase chromosomes are also well known in the art. A nucleotide probe will hybridize specifically to nucleotide sequences in the chromosome preparations that are complementary to the nucleotide sequence of the probe.

[0185] Polynucleotides are mapped to particular chromosomes using, for example, radiation hybrids or chromosome-specific hybrid panels. See Leach et al., Advances in Genetics, (1995) 33:63-99; Walter et al., Nature Genetics (1994) 7:22; Walter and Goodfellow, Trends in Genetics (1992) 9:352. Panels for radiation hybrid mapping are available from Research Genetics, Inc., Huntsville, Ala., USA. Databases for markers using various panels are available via the world wide web at http:/F/shgc-www.stanford.edu; and http://www-genome.wi.mit.edu/cgi-bin/contig/rhmapper.pl. The statistical program RHMAP can be used to construct a map based on the data from radiation hybridization with a measure of the relative likelihood of one order versus another. RHMAP is available via the world wide web at http://www.sph.umich.edu/group/statgen/software.

[0186] In addition, commercial programs are available for identifying regions of chromosomes commonly associated with disease, such as cancer. Polynucleotides based on the polynucleotides of the invention can be used to probe these regions. For example, if through profile searching a provided polynucleotide is identified as corresponding to a gene encoding a kinase, its ability to bind to a cancer-related chromosomal region will suggest its role as a kinase in one or more stages of tumor cell development/growth. Although some experimentation would be required to elucidate the role, the polynucleotide constitutes a new material for isolating a specific protein that has potential for developing a cancer diagnostic or therapeutic.

[0187] Tissue Typing or Profiling.

[0188] Expression of specific mRNA corresponding to the provided polynucleotides can vary in different cell types and can be tissue-specific. This variation of mRNA levels in different cell types can be exploited with nucleic acid probe assays to determine tissue types. For example, PCR, branched DNA probe assays, or blotting techniques utilizing nucleic acid probes substantially identical or complementary to polynucleotides listed in the Sequence Listing can determine the presence or absence of the corresponding cDNA or mRNA.

[0189] For example, a metastatic lesion is identified by its developmental organ or tissue source by identifying the expression of a particular marker of that organ or tissue. If a polynucleotide is expressed only in a specific tissue type, and a metastatic lesion is found to express that polynucleotide, then the developmental source of the lesion has been identified. Expression of a particular polylucleotide is assayed by detection of either the corresponding mRNA or the protein product. Immunological methods, such as antibody staining, are used to detect a particular protein product. Hybridization methods can be used to detect particular mRNA species, including but not limited to in situ hybridization and Northern blotting.

[0190] Use of Polymorphisms.

[0191] A polynucleotide of the invention will be useful in forensics, genetic analysis, mapping, and diagnostic applications if the corresponding region of a gene is polymorphic in the human population. Particular polymorphic forms of the provided polynucleotides can be used to either identify a sample as deriving from a suspect or rule out the possibility that the sample derives from the suspect. Any means for detecting a polymorphism in a gene are used, including but not limited to electrophoresis of protein polymorphic variants, differential sensitivity to restriction enzyme cleavage, and hybridization to allele-specific probes.

[0192] B. Antibody Production

[0193] Expression products of a polynucleotide of the invention, the corresponding mRNA or cDNA, or the corresponding complete gene are prepared and used for raising antibodies for experimental, diagnostic, and therapeutic purposes. For polynucleotides to which a corresponding gene has not been assigned, this provides an additional method of identifying the corresponding gene. The polynucleotide or related cDNA is expressed as described above, and antibodies are prepared. These antibodies are specific to an epitope on the polypeptide encoded by the polynucleotide, and can precipitate or bind to the corresponding native protein in a cell or tissue preparation or in a cell-free extract of an in vitro expression system.

[0194] Immunogens for raising antibodies are prepared by mixing the polypeptides encoded by the polynucleotides of the present invention with adjuvants. Alternatively, polypeptides are made as fusion proteins to larger immunogenic proteins. Polypeptides are also covalently linked to other larger immunogenic proteins, such as keyhole limpet hemocyanin. Immunogens are typically administered intradermally, subcutaneously, or intramuscularly. Immunogens are administered to experimental animals such as rabbits, sheep, and mice, to generate antibodies. Optionally, the animal spleen cells are isolated and fused with myeloma cells to form hybridomas which secrete monoclonal antibodies. Such methods are well known in the art. According to another method known in the art, the selected polynucleotide is administered directly, such as by intramuscular injection, and expressed in vivo. The expressed protein generates a variety of protein-specific immune responses, including production of antibodies, comparable to administration of the protein.

[0195] Preparations of polyclonal and monoclonal antibodies specific for polypeptides encoded by a selected polynucleotide are made using standard methods known in the art. The antibodies specifically bind to epitopes present in the polypeptides encoded by polynucleotides disclosed in the Sequence Listing. Typically, at least 6, 8, 10, or 12 contiguous amino acids are required to form an epitope. However, epitopes which involve non-contiguous amino acids may require more, for example at least 15, 25, or 50 amino acids. A short sequence of a polynucleotide may then be unsuitable for use as an epitope to raise antibodies for identifying the corresponding novel protein, because of the potential for cross-reactivity with a known protein. However, the antibodies can be useful for other purposes, particularly if they identify common structural features of a known protein and a novel polypeptide encoded by a polynucleotide of the invention.

[0196] Antibodies that specifically bind to human polypeptides encoded by the provided polypeptides should provide a detection signal at least 5-, 10-, or 20-fold higher than a detection signal provided with other proteins when used in Western blots or other immunochemical assays. Preferably, antibodies that specifically polypeptides of the invention do not bind to other proteins in immunochemical assays at detectable levels and can immunoprecipitate the specific polypeptide from solution.

[0197] To test for the presence of serum antibodies to the polypeptide of the invention in a human population, human antibodies are purified by methods well known in the art. Preferably, the antibodies are affinity purified by passing antiserum over a column to which the corresponding selected polypeptide or fiusion protein is bound. The bound antibodies can then be eluted from the column, for example using a buffer with a high salt concentration.

[0198] In addition to the antibodies discussed above, genetically engineered antibody derivatives are made, such as single chain antibodies, according to methods well known in the art.

[0199] C. Use of Polynucleotides to Construct Arrays for Diagnostics

[0200] Polynucleotide arrays provide a high throughput technique that can assay a large number of polynucleotide sequences in a sample. This technology can be used as a diagnostic and as a tool to test for differential expression to determine function of an encoded protein. Arrays can be created by spotting polynucleotide probes onto a substrate (e.g., glass, nitrocelllose, etc.) in a two-dimensional matrix or array having bound probes. The probes can be bound to the substrate by either covalent bonds or by non-specific interactions, such as hydrophobic interactions. Samples of polynucleotides can be detectably labeled (e.g., using radioactive or fluorescent labels) and then hybridized to the probes. Double stranded polynucleotides, comprising the labeled sample polynucleotides bound to probe polynucleotides, can be detected once the unbound portion of the sample is washed away. Techniques for constructing arrays and methods of using these arrays are described in EP No. 0 799 897; PCT No. WO 97/29212; PCT No. WO 97/27317; EP No. 0 785 280; PCT No. WO 97/02357; U.S. Pat. No. 5,593,839; U.S. Pat. No. 5,578,832; EP No. 0 728 520; U.S. Pat. No. 5,599,695; EP No. 0 721 016; U.S. Pat. No. 5,556,752; PCT No. WO 95/22058; and U.S. Pat. No. 5,631,734.

[0201] As discussed in some detail above, arrays can be used to examine differential expression of genes and can be used to determine gene function. For example, arrays of the instant polynucleotide sequences can be used to determine if any of the provided polynucleotides are differentially expressed between a test cell and control cell (e.g., cancer cells and normal cells). For example, high expression of a particular message in a cancer cell, which is not observed in a corresponding normal cell, can indicate a cancer specific protein. Exemplary uses of arrays are further described in, for example, Pappalarado et al., Sem. Radiation Oncol. (1998) 8:217; and Ramsay Nature Biotechnol. (1998) 16:40.

[0202] D. Differential Exipression

[0203] The polynucleotides of the invention can also be used to detect differences in expression levels between two cells, e.g, as a method to identify abnormal or diseased tissue in a human. For polynucleotides corresponding to profiles of protein families as described above, the choice of tissue can be selected according to the putative biological function. In general, the expression of a gene corresponding to a specific polynucleotide is compared between a first tissue that is suspected of being diseased and a second, normal tissue of the human. The tissue suspected of being abnormal or diseased can be derived from a different tissue type of the human, but preferably it is derived from the same tissue type; for example an intestinal polyp or other abnormal growth should be compared with normal intestinal tissue. The normal tissue can be the same tissue as that of the test sample, or any normal tissue of the patient, especially those that express the polynucleotide-related gene of interest (e.g, brain, thymus, testis, heart, prostate, placenta, spleen, small intestine, skeletal muscle, pancreas, and the mucosal lining of the colon). A difference between the polynucleotide-related gene, mRNA, or protein in the two tissues which are compared, for example in molecular weight, amino acid or nucleotide sequence, or relative abundance, indicates a change in the gene, or a gene which regulates it, in the tissue of the human that was suspected of being diseased. Examples of detection of differential expression and its use in diagnosis of cancer are described in U.S. Pat. Nos. 5,688,641 and 5,677,125.

[0204] The polynucleotide-related genes in the two tissues are compared by any means known in the art. For example, the two genes can be sequenced, and the sequence of the gene in the tissue suspected of being diseased compared with the gene sequence in the normal tissue. The genes corresponding to a provided polynucleotide, or portions thereof, in the two tissues are amplified, for example using nucleotide primers based on the nucleotide sequence shown in the Sequence Listing, using the polymerase chain reaction. The amplified genes or portions of genes are hybridized to detectably labeled nucleotide probes selected from a nucleotide sequence shown in the Sequence Listing. A difference in the nucleotide sequence of the isolated gene in the tissue suspected of being diseased compared with the normal nucleotide sequence suggests a role of the gene product encoded by the subject polynucleotide in the disease, and provides guidance for preparing a therapeutic agent.

[0205] Alternatively, mRNA corresponding to a provided polynucleotide in the two tissues is compared. PolyA⁺RNA is isolated from the two tissues as is known in the art. For example, one of skill in the art can readily determine differences in the size or amount of mRNA transcripts between the two tissues using Northern blots and detectably labeled nucleotide probes selected from the nucleotide sequence shown in the Sequence Listing. Increased or decreased expression of a given mRNA in a tissue sample suspected of being diseased, compared with the expression of the same mRNA in a normal tissue, suggests that the expressed protein has a role in the disease, and also provides a lead for preparing a therapeutic agent.

[0206] The comparison can also be accomplished by analyzing polypeptides between the matched samples. The sizes of the proteins in the two tissues are compared, for example, using antibodies of the present invention to detect polypeptides in Western blots of protein extracts from the two tissues. Other changes, such as expression levels and subcellular localization, can also be detected immunologically, using antibodies to the corresponding protein. A higher or lower level of expression of a given polypeptide in a tissue suspected of being diseased, compared with the same protein expression level in a normal tissue, is indicative that the expressed protein has a role in the disease, and provides guidance for preparing a therapeutic agent.

[0207] Similarly, comparison of polynucleotide sequences or of gene expression products, e.g., mRNA and protein, between a human tissue that is suspected of being diseased and a normal tissue of a human, are used to follow disease progression or remission in the human. Such comparisons are made as described above. For example, increased or decreased expression of a gene corresponding to an inventive polynucleotide in the tissue suspected of being neoplastic can indicate the presence of neoplastic cells in the tissue. The degree of increased expression of a given gene in the neoplastic tissue relative to expression of the same gene in normal tissue, or differences in the amount of increased expression of a given gene in the neoplastic tissue over time, is used to assess the progression of the neoplasia in that tissue or to monitor the response of the neoplastic tissue to a therapeutic protocol over time.

[0208] The expression pattern of any two cell types can be compared, such as low and high metastatic tumor cell lines, malignant or non-malignant cells, or cells from tissue which have and have not been exposed to a therapeutic agent. A genetic predisposition to disease in a human is detected by comparing expression levels of an mRNA or protein corresponding to a polynucleotide of the invention in a fetal tissue with levels associated in normal fetal tissue. Fetal tissues that are used for this purpose include, but are not limited to, amniotic fluid, chorionic villi, blood, and the blastomere of an in vitro-fertilized embryo. The comparable normal polynucleotide-related gene is obtained from any tissue. The mRNA or protein is obtained from a normal tissue of a human in which the polynucleotide-related gene is expressed. Differences such as alterations in the nucleotide sequence or size of the same product of the fetal polynucleotide-related gene or mRNA, or alterations in the molecular weight, amino acid sequence, or relative abundance of fetal protein, can indicate a germline mutation in the polynucleotide-related gene of the fetus, which indicates a genetic predisposition to disease. Particular diagnostic and prognostic uses of the disclosed polynucleotides are described in more detail below.

[0209] E. Diagnostic, Prognostic, and Other Uses Based on Differential Expression

[0210] In general, diagnostic methods of the invention for involve detection of a level or amount of a gene product, particularly a differentially expressed gene product, in a test sample obtained from a patient suspected of having or being susceptible to a disease (e.g., breast cancer, lung cancer, colon cancer and/or metastatic forms thereof), and comparing the detected levels to those levels found in normal cells (e.g., cells substantially unaffected by cancer) and/or other control cells (e.g., to differentiate a cancerous cell from a cell affected by dysplasia). Furthermore, the severity of the disease can be assessed by comparing the detected levels of a differentially expressed gene product with those levels detected in samples representing the levels of differentially gene product associated with varying degrees of severity of disease.

[0211] The term “differentially expressed gene” is intended to encompass a polynucleotide that can, for example, include an open reading frame encoding a gene product (e.g., a polypeptide), and/or introns of such genes and adjacent 5′ and 3′ non-coding nucleotide sequences involved in the regulation of expression, up to about 20 kb beyond the coding region, but possibly further in either direction. The gene can be introduced into an appropriate vector for extrachromosomal maintenance or for integration into a host genome. In general, a difference in expression level associated with a decrease in expression level of at least about 25%, usually at least about 50% to 75%, more usually at least about 90% or more is indicative of a differentially expressed gene of interest, i.e., a gene that is underexpressed or down-regulated in the test sample relative to a control sample. Furthermore, a difference in expression level associated with an increase in expression of at least about 25%, usually at least about 50% to 75%, more usually at least about 90% and can be at least about 1½-fold, usually at least about 2-fold to about 10-fold, and can be about 100-fold to about 1,000-fold increase relative to a control sample is indicative of a differentially expressed gene of interest, i.e., an overexpressed or up-regulated gene.

[0212] “Differentially expressed polynucleotide” as used herein means a nucleic acid molecule (RNA or DNA) having a sequence that represents a differentially expressed gene, e.g., the differentially expressed polynucleotide comprises a sequence (e.g, an open reading frame encoding a gene product) that uniquely identifies a differentially expressed gene so that detection of the differentially expressed polynucleotide in a sample is correlated with the presence of a differentially expressed gene in a sample. “Differentially expressed polynucleotides” is also meant to encompass fragments of the disclosed polynucleotides, e.g., fragments retaining biological activity, as well as nucleic acids homologous, substantially similar, or substantially identical (e.g., having about 90% sequence identity) to the disclosed polynucleotides.

[0213] Methods of the subject invention useful in diagnosis or prognosis typically involve comparison of the abundance of a selected differentially expressed gene product in a sample of interest with that of a control to determine any relative differences in the expression of the gene product, where the difference can be measured qualitatively and/or quantitatively. Quantitation can be accomplished, for example, by comparing the level of expression product detected in the sample with the amounts of product present in a standard curve. A comparison can be made visually; by using a technique such as densitometry, with or without computerized assistance; by preparing a representative library of cDNA clones of mRNA isolated from a test sample, sequencing the clones in the library to determine that number of cDNA clones corresponding to the same gene product, and analyzing the number of clones corresponding to that same gene product relative to the number of clones of the same gene product in a control sample; or by using an array to detect relative levels of hybridization to a selected sequence or set of sequences, and comparing the hybridization pattern to that of a control. The differences in expression are then correlated with the presence or absence of an abnormal expression pattern. A variety of different methods for determining the nucleic acid abundance in a sample are known to those of skill in the art, where particular methods of interest include those described in: Pietu et al. Genome Res. (1996) 6:492; Zhao et al., Gene (1995) 156:207; Soares, Curr. Opin. Biotechnol. (1 977) 8: 542; Raval, J. Pharmacol Toxicol Methods (1994) 32:125; Chalifour et al., Anal. Biochem (1994) 216:299; Stolz et al., Mol. Biotechnol. (1996) 6:225; Hong et al., Biosci. Reports (1982) 2:907; and McGraw, Anal. Biochem. (1984) 143:298. Also of interest are the methods disclosed in WO 97/27317, the disclosure of which is herein incorporated by reference.

[0214] In general, diagnostic assays of the invention involve detection of a gene product of a the polynucleotide sequence (e.g., mRNA or polypeptide) that corresponds to a sequence of SEQ ID NOS:1-844. The patient from whom the sample is obtained can be apparently healthy, susceptible to disease (e.g., as determined by family history or exposure to certain environmental factors), or can already be identified as having a condition in which altered expression of a gene product of the invention is implicated.

[0215] In the assays of the invention, the diagnosis can be determined based on detected gene product expression levels of a gene product encoded by at least one, preferably at least two or more, at least 3 or more, or at least 4 or more of the polynucleotides having a sequence set forth in SEQ ID NOS:1-844, and can involve detection of expression of genes corresponding to all of SEQ ID NOS:1-844 and/or additional sequences that can serve as additional diagnostic markers and/or reference sequences. Where the diagnostic method is designed to detect the presence or susceptibility of a patient to cancer, the assay preferably involves detection of a gene product encoded by a gene corresponding to a polynucleotide that is differentially expressed in cancer. For example, a higher level of expression of a polynucleotide corresponding to SEQ ID NO:52 relative to a level associated with a noimal sample can indicate the presence of cancer in the patient from whom the sample is derived. In another example, detection of a lower level of a polynucleotide corresponding to SEQ ID NO:39 relative to a normal level is indicative of the presence of cancer in the patient. Further examples of such differentially expressed polynucleotides are described in the Examples below. Given the provided polynucleotides and information regarding their relative expression levels provided herein, assays using such polynucleotides and detection of their expression levels in diagnosis and prognosis will be readily apparent to the ordinarily skilled artisan.

[0216] Any of a variety of detectable labels can be used in connection with the various embodiments of the diagnostic methods of the invention. Suitable detectable labels include fluorochromes,(e.g. fluorescein isothiocyanate (FITC), rhodamine, Texas Red, phycoerythrin, allophycocyanin, 6-carboxyfluorescein (6-FAM), 2′,7′-dimethoxy-4′,5′-dichloro-6-carboxyfluorescein (JOE), 6-carboxy-X-rhodamine (ROX), 6-carboxy-2′,4′,7′,4,7-hexachlorofluorescein (HEX), 5-carboxyfluorescein (5-FAM) or N,N,N′,N′-tetramethyl-6-carboxyrhodamine (TAMRA)), radioactive labels, (e.g. ³²P, ³⁵S, ³H, etc.), and the like. The detectable label can involve a two stage systems (e.g., biotin-avidin, hapten-anti-hapten antibody, etc.)

[0217] Reagents specific for the polynucleotides and polypeptides of the invention, such as antibodies and nucleotide probes, can be supplied in a kit for detecting the presence of an expression product in a biological sample. The kit can also contain buffers or labeling components, as well as instructions for using the reagents to detect and quantify expression products in the biological sample. Exemplary embodiments of the diagnostic methods of the invention are described below in more detail.

[0218] Polypeptide Detection in Diagnosis.

[0219] In one embodiment, the test sample is assayed for the level of a differentially expressed polypeptide. Diagnosis can be accomplished using any of a number of methods to determine the absence or presence or altered amounts of the differentially expressed polypeptide in the test sample. For example, detection can utilize staining of cells or histological sections with labeled antibodies, performed in accordance with conventional methods. Cells can be permneabilized to stain cytoplasmic molecules. In general, antibodies that specifically bind a differentially expressed polypeptide of the invention are added to a sample, and incubated for a period of time sufficient to allow binding to the epitope, usually at least about 10 minutes. The antibody can be detectably labeled for direct detection (e.g., using radioisotopes, enzymes, fluorescers, chemiluminescers, and the like), or can be used in conjunction with a second stage antibody or reagent to detect binding (e.g., biotin with horseradish peroxidase-conjugated avidin, a secondary antibody conjugated to a fluorescent compound, e.g. fluorescein, rhodamine, Texas red, etc.). The absence or presence of antibody binding can be determined by various methods, including flow cytometry of dissociated cells, microscopy, radiography, scintillation counting, etc. Any suitable alternative methods can of qualitative or quantitative detection of levels or amounts of differentially expressed polypeptide can be used, for example ELISA, western blot, immunoprecipitation, radioimmunoassay, etc.

[0220] In general, the detected level of differentially expressed polypeptide in the test sample is compared to a level of the differentially expressed gene product in a reference or control sample, e.g., in a normal cell (negative control) or in a cell having a known disease state (positive control). For example, a higher level of expression of a polypeptide encoded by SEQ ID NO:52 relative to a level associated with a normal sample can indicate the presence of cancer in the patient from whom the sample is derived. In another example, detection of a lower level of the polypeptide encoded by SEQ ID NO:39 relative to a normal level is indicative of the presence of cancer in the patient.

[0221] mRNA Detection.

[0222] The diagnostic methods of the invention can also or alternatively involve detection of mRNA encoded by a gene corresponding to a differentially expressed polynucleotides of the invention. Any suitable qualitative or quantitative methods known in the art for detecting specific mRNAs can be used. mRNA can be detected by, for example, in situ hybridization in tissue sections, by reverse transcriptase-PCR, or in Northern blots containing poly A+ mRNA. One of skill in the art can readily use these methods to determine differences in the size or amount of mRNA transcripts between two samples. For example, the level of mRNA of the invention in a tissue sample suspected of being cancerous or dysplastic is compared with the expression of the mRNA in a reference sample, e.g., a positive or negative control sample (e.g., normal tissue, cancerous tissue, etc.). In a specific non-limiting example, a higher level of mRNA corresponding to SEQ ID NO:52 relative to a level associated with a normal sample can indicate the presence of cancer in the patient from whom the sample is derived. In another example, detection of a lower level of mRNA corresponding to SEQ ID NO:39 relative to a normal level is indicative of the presence of cancer in the patient.

[0223] Any suitable method for detecting and comparing mRNA expression levels in a sample can be used in connection with the diagnostic methods of the invention (see, e.g., U.S. Pat. No. 5,804,382). For example, mRNA expression levels in a sample can be determined by generation of a library of expressed sequence tags (ESTs) from the sample, where the EST library is representative of sequences present in the sample (Adams, et al., (1991) Science 252:1651). Enumeration of the relative representation of ESTs within the library can be used to approximate the relative representation of the gene transcript within the starting sample. The results of EST analysis of a test sample can then be compared to EST analysis of a reference sample to determine the relative expression levels of a selected polynucleotide, particularly a polynucleotide corresponding to one or more of the differentially expressed genes described herein.

[0224] Alternatively, gene expression in a test sample can be performed using serial analysis of gene expression (SAGE) methodology (Velculescu et al., Science (1995) 270:484). In short, SAGE involves the isolation of short unique sequence tags from a specific location within each transcript (e.g, a sequence of any one of SEQ ID NOS:1-6). The sequence tags are concatenated, cloned, and sequenced. The frequency of particular transcripts within the starting sample is reflected by the number of times the associated sequence tag is encountered with the sequence population.

[0225] Gene expression in a test sample can also be analyzed using differential display (DD) methodology. In DD, fragments defined by specific sequence delimiters (e.g., restriction enzyme sites) are used as unique identifiers of genes, coupled with information about fragment length or fragment location within the expressed gene. The relative representation of an expressed gene with a sample can then be estimated based on the relative representation of the fragment associated with that gene within the pool of all possible fragments. Methods and compositions for carrying out DD are well known in the art, see, e.g., U.S. Pat. No. 5,776,683; and U.S. Pat. No. 5,807,680.

[0226] Alternatively, gene expression in a sample using hybridization analysis, which is based on the specificity of nucleotide interactions. Oligonucleotides or cDNA can be used to selectively identify or capture DNA or RNA of specific sequence composition, and the amount of RNA or cDNA hybridized to a known capture sequence determined qualitatively or quantitatively, to provide information about the relative representation of a particular message within the pool of cellular messages in a sample. Hybridization analysis can be designed to allow for concurrent screening of the relative expression of hundreds to thousands of genes by using, for example, array-based technologies having high density formats, including filters, microscope slides, or microchips, or solution-based technologies that use spectroscopic analysis (e.g., mass spectrometry). One exemplary use of arrays in the diagnostic methods of the invention is described below in more detail.

[0227] Use of a Single Gene in Diagnostic Applications.

[0228] The diagnostic methods of the invention can focus on the expression of a single differentially expressed gene. For example, the diagnostic method can involve detecting a differentially expressed gene, or a polymorphism of such a gene (e.g., a polymorphism in an coding region or control region), that is associated with disease. Disease-associated polymorphisms can include deletion or truncation of the gene, mutations that alter expression level and/or affect activity of the encoded protein, etc.

[0229] Changes in the promoter or enhancer sequence that affect expression levels of an differentially gene can be compared to expression levels of the normal allele by various methods known in the art. Methods for determining promoter or enhancer strength include quantitation of the expressed natural protein; insertion of the variant control element into a vector with a reporter gene such as β-galactosidase, luciferase, chloramphenicol acetyltransferase, etc. that provides for convenient quantitation; and the like.

[0230] A number of methods are available for analyzing nucleic acids for the presence of a specific sequence, e.g. a disease associated polymorphism. Where large amounts of DNA are available, genomic DNA is used directly. Alternatively, the region of interest is cloned into a suitable vector and grown in sufficient quantity for analysis. Cells that express a differentially expressed gene can be used as a source of mRNA, which can be assayed directly or reverse transcribed into cDNA for analysis. The nucleic acid can be amplified by conventional techniques, such as the polymerase chain reaction (PCR), to provide sufficient amounts for analysis, and a detectable label can be included in the amplification reaction (e.g., using a detectably labeled primer or detectably labeled oligonucleotides) to facilitate detection. The use of the polymerase chain reaction is described in Saiki, et al., Science (1985) 239:487, and a review of techniques can be found in Sambrook, et al., Molecular Cloning: A Laboratory Manual, (1989) pp. 14.2. Alternatively, various methods are known in the art that utilize oligonucleotide ligation as a means of detecting polymorphisms, for examples see Riley et al., Nucl. Acids Res. (1990) 18:2887; and Delahunty et al., Am. J. Hum. Genet. (1996) 58:1239.

[0231] The sample nucleic acid, e.g. amplified or cloned fragment, is analyzed by one of a number of methods known in the art. The nucleic acid can be sequenced by dideoxy or other methods, and the sequence of bases compared to a selected sequence, e.g., to a wild-type sequence. Hybridization with the polymorphic or variant sequence can also be used to determine its presence in a sample (e.g., by Southern blot, dot blot, etc). The hybridization pattern of a polymorphic or variant sequence and a control sequence to an array of oligonucleotide probes immobilized on a solid support, as described in U.S. Pat. No. 5,445,934, or in WO 95/35505, can also be used as a means of identifying polymorphic or variant sequences associated with disease. Single strand conformational polymorphism (SSCP) analysis, denaturing gradient gel electrophoresis (DGGE), and heteroduplex analysis in gel matrices are used to detect conformational changes created by DNA sequence variation as alterations in electrophoretic mobility. Alternatively, where a polymorphism creates or destroys a recognition site for a restriction endonuclease, the sample is digested with that endonuclease, and the products size fractionated to determine whether the fragment was digested. Fractionation is performed by gel or capillary electrophoresis, particularly acrylamide or agarose gels.

[0232] Screening for mutations in an differentially expressed gene can be based on the functional or antigenic characteristics of the protein. Protein truncation assays are useful in detecting deletions that can affect the biological activity of the protein. Various immunoassays designed to detect polymorphisms in proteins can be used in screening. Where many diverse genetic mutations lead to a particular disease phenotype, functional protein assays have proven to be effective screening tools. The activity of the encoded protein can be determined by comparison with the wild-type protein.

[0233] Pattern Matching in Diagnosis Using Arrays.

[0234] In another embodiment, the diagnostic and/or prognostic methods of the invention involve detection of expression of a selected set of genes in a test sample to produce a test expression pattern (TEP). The TEP is compared to a reference expression pattern (REP), which is generated by detection of expression of the selected set of genes in a reference sample (e.g., a positive or negative control sample). The selected set of genes includes at least one of the genes of the invention, which genes correspond to the polynucleotide sequences of SEQ ID NOS:1-844. Of particular interest is a selected set of genes that includes gene differentially expressed in the disease for which the test sample is to be screened.

[0235] “Reference sequences” or “reference polynucleotides” as used herein in the context of differential gene expression analysis and diagnosis/prognosis refers to a selected set of polynucleotides, which selected set includes at least one or more of the differentially expressed polynucleotides described herein. A plurality of reference sequences, preferably comprising positive and negative control sequences, can be included as reference sequences. Additional suitable reference sequences are found in Genbank, Unigene, and other nucleotide sequence databases (including, e.g., expressed sequence tag (EST), partial, and full-length sequences).

[0236] “Reference array” means an array having reference sequences for use in hybridization with a sample, where the reference sequences include all, at least one of, or any subset of the differentially expressed polynucleotides described herein. Usually such an array will include at least 3 different reference sequences, and can include any one or all of the provided differentially expressed sequences. Arrays of interest can further comprise sequences, including polymorphisms, of other genetic sequences, particularly other sequences of interest for screening for a disease or disorder (e.g., cancer, dysplasia, or other related or unrelated diseases, disorders, or conditions). The oligonucleotide sequence on the array will usually be at least about 12 nt in length, and can be of about the length of the provided sequences, or can extend into the flanking regions to generate fragments of 100 nt to 200 nt in length or more.

[0237] A “reference expression pattern” or “REP” as used herein refers to the relative levels of expression of a selected set of genes, particularly of differentially expressed genes, that is associated with a selected cell type, e.g., a normal cell, a cancerous cell, a cell exposed to an environrrental stimulus, and the like. A “test expression pattern” or “TEP” refers to relative levels of expression of a selected set of genes, particularly of differentially expressed genes, in a test sample (e.g., a cell of unknown or suspected disease state, from which mRNA is isolated).

[0238] “Diagnosis” as used herein generally includes determination of a subject's susceptibility to a disease or disorder, determination as to whether a subject is presently affected by a disease or disorder, as well as to the prognosis of a subject affected by a disease or disorder (e.g., identification of pre-metastatic or metastatic cancerous states, stages of cancer, or responsiveness of cancer to therapy). The present invention particularly encompasses diagnosis of subjects in the context of breast cancer (e.g., carcinoma in situ (e.g., ductal carcinoma in situ), estrogen receptor (ER)-positive breast cancer, ER-negative breast cancer, or other forms and/or stages of breast cancer), lung cancer (e.g., small cell carcinoma, non-small cell carcinoma, mesothelioma, and other forms and/or stages of lung cancer), and colon cancer (e.g., adenomatous polyp, colorectal carcinoma, and other forms and/or stages of colon cancer).

[0239] “Sample” or “biological sample” as used throughout here are generally meant to refer to samples of biological fluids or tissues, particularly samples obtained from tissues, especially from cells of the type associated with the disease for which the diagnostic application is designed (e.g., ductal adenocarcinoma), and the like. “Samples” is also meant to encompass derivatives and fractions of such samples (e.g., cell lysates). Where the sample is solid tissue, the cells of the tissue can be dissociated or tissue sections can be analyzed.

[0240] REPs can be generated in a variety of ways according to methods well known in the art. For example, REPs can be generated by hybridizing a control sample to an array having a selected set of polynucleotides (particularly a selected set of differentially expressed polynucleotides), acquiring the hybridization data from the array, and storing the data in a format that allows for ready comparison of the REP with a TEP. Alternatively, all expressed sequences in a control sample can be isolated and sequenced, e.g., by isolating mRNA from a control sample, converting the mRNA into cDNA, and sequencing the cDNA. The resulting sequence information roughly or precisely reflects the identity and relative number of expressed sequences in the sample. The sequence information can then be stored in a format (e.g., a computer-readable format) that allows for ready comparison of the REP with a TEP. The REP can be normalized prior to or after data storage, and/or can be processed to selectively remove sequences of expressed genes that are of less interest or that might complicate analysis (e.g., some or all of the sequences associated with housekeeping genes can be eliminated from REP data).

[0241] TEPs can be generated in a manner similar to REPs, e.g., by hybridizing a test sample to an array having a selected set of polynucleotides, particularly a selected set of differentially expressed polynucleotides, acquiring the hybridization data from the array, and storing the data in a format that allows for ready comparison of the TEP with a REP. The REP and TEP to be used in a comparison can be generated simultaneously, or the TEP can be compared to previously generated and stored REPs.

[0242] In one embodiment of the invention, comparison of a TEP with a REP involves hybridizing a test sample with a reference array, where the reference array has one or more reference sequences for use in hybridization with a sample. The reference sequences include all, at least one of, or any subset of the differentially expressed polynucleotides described herein. Hybridization data for the test sample is acquired, the data normalized, and the produced TEP compared with a REP generated using an array having the same or similar selected set of differentially expressed polynucleotides. Probes that correspond to sequences differentially expressed between the two samples will show decreased or increased hybridization efficiency for one of the samples relative to the other.

[0243] Reference arrays can be produced according to any suitable methods known in the art. For example, methods of producing large arrays of oligonucleotides are described in U.S. Pat. No. 5,134,854, and U.S. Pat. No. 5,445,934 using light-directed synthesis techniques. Using a computer controlled system, a heterogeneous array of monomers is converted, through simultaneous coupling at a number of reaction sites, into a heterogeneous array of polymers. Alternatively, microarrays are generated by deposition of pre-synthesized oligonucleotides onto a solid substrate, for example as described in PCT published application no. WO 95/35505.

[0244] Methods for collection of data from hybridization of samples with a reference arrays are also well known in the art. For example, the polynucleotides of the reference and test samples can be generated using a detectable fluorescent label, and hybridization of the polynucleotides in the samples detected by scanning the microarrays for the presence of the detectable label. Methods and devices for detecting fluorescently marked targets on devices are known in the art. Generally, such detection devices include a microscope and light source for directing light at a substrate. A photon counter detects fluorescence from the substrate, while an x-y translation stage varies the location of the substrate. A confocal detection device that can be used in the subject methods is described in U.S. Pat. No. 5,631,734. A scanning laser microscope is described in Shalon et al., Genome Res. (1996) 6:639. A scan, using the appropriate excitation line, is performed for each fluorophore used. The digital images generated from the scan are then combined for subsequent analysis. For any particular array element, the ratio of the fluorescent signal from one sample (e.g., a test sample) is compared to the fluorescent signal from another sample (e.g., a reference sample), and the relative signal intensity determined.

[0245] Methods for analyzing the data collected from hybridization to arrays are well known in the art. For example, where detection of hybridization involves a fluorescent label, data analysis can include the steps of determining fluorescent intensity as a function of substrate position from the data collected, removing outliers, i.e. data deviating from a predetermined statistical distribution, and calculating the relative binding affinity of the targets from the remaining data. The resulting data can be displayed as an image with the intensity in each region varying according to the binding affinity between targets and probes.

[0246] In general, the test sample is classified as having a gene expression profile corresponding to that associated with a disease or non-disease state by comparing the TEP generated from the test sample to one or more REPs generated from reference samples (e.g., from samples associated with cancer or specific stages of cancer, dysplasia, samples affected by a disease other than cancer, normal samples, etc.). The criteria for a match or a substantial match between a TEP and a REP include expression of the same or substantially the same set of reference genes, as well as expression of these reference genes at substantially the same levels (e.g., no significant difference between the samples for a signal associated with a selected reference sequence after normalization of the samples, or at least no greater than about 25% to about 40% difference in signal strength for a given reference sequence. In general, a pattern match between a TEP and a REP includes a match in expression, preferably a match in qualitative or quantitative expression level, of at least one of, all or any subset of the differentially expressed genes of the invention.

[0247] Pattern matching can be performed manually, or can be performed using a computer program. Methods for preparation of substrate matrices (e.g., arrays), design of oligonucleotides for use with such matrices, labeling of probes, hybridization conditions, scanning of hybridized matrices, and analysis of patterns generated, including comparison analysis, are described in, for example, U.S. Pat. No. 5,800,992.

[0248] F. Use of the Polynucleotides of the Invention in Cancer

[0249] Oncogenesis involves the unbridled growth, dedifferentiation and abnormal migration of cells. Cancerous cells can have the ability to compress, invade, and destroy normal tissue. Cancerous cells may also metastasize to other parts of the body via the bloodstream or the lymph system and colonize in these other areas. Different cancers are classified by the cell from which the cancerous cell is derived and from its cellular morphology and/or state of differentiation.

[0250] Somatic genetic abnormalities cause cancer initiation and progression. Cancer generally is clonally formed, i.e.gain of function of oncogenes and loss of function of tumor suppressor genes within a single cell transform the cell to be cancerous, and that single cell grows and divides to form a cancerous lesion. The genes known to be involved in cancer initiation and progression are involved in numerous cellular functions, including developmental differentiation, cell cycle regulation, cell signaling, immunological response, DNA replication, and DNA repair.

[0251] The identification and characterization of genetic or biochemical markers in blood or tissues that will detect the earliest changes along the carcinogenesis pathway and monitor the efficacy of various therapies and preventive interventions is a major goal of cancer research. Scientists have identified genetic changes in stool specimens that indicate the stages of colon cancer, and other biomarkers such as gene mutations, hormone receptors, proteins that inhibit metastasis, and enzymes that metabolize drugs are all being used to determine the severity and predict the course of breast, prostate, lung, and other cancers.

[0252] Recent advances in the pathogenesis of certain cancers has been helpful in determining patient treatment. The level of expression of certain polynucleotides can be indicative of a poorer prognosis, and therefore warrant more aggressive chemo- or radio-therapy for a patient. The correlation of novel surrogate tumor specific features with response to treatment and outcome in patients has defined certain prognostic indicators that allow the design of tailored therapy based on the molecular profile of the tumor. These therapies include antibody targeting and gene therapy. Moreover, a promising level of one or more marker polynucleotides can provide impetus for not aggressively treating a particular patient, thus sparing the patient the deleterious side effects of aggressive therapy. Determining expression of certain polynucleotides and comparison of a patients profile with known expression in normal tissue and variants of the disease allows a determination of the best possible treatment for a patient, both in terms of specificity of treatment and in terms of comfort level of the patient.

[0253] Surrogate tumor markers, such as polynucleotide expression, can also be used to better classify, and thus diagnose and treat, different forms and disease states of cancer. Two classifications widely used in oncology that can benefit from identification of the expression levels of the polynucleotides of the invention are staging of the cancerous disorder, and grading the nature of the cancerous tissue.

[0254] Staging.

[0255] Staging is a process used by physicians to describe how advanced the cancerous state is in a patient. Staging assists the physician in determining a prognosis, planning treatment and evaluating the results of such treatment. Different staging systems are used for different types of cancer, but each generally involves the following determinations: the type of tumor, indicated by T; whether the cancer has metastasized to nearby lymph nodes, indicated by N; and whether the cancer has metastasized to more distant parts of the body, indicated by M. This system of staging is called the TNM system. Generally, if a cancer is only detectable in the area of the primary lesion without having spread to any lymph nodes it is called Stage I. If it has spread only to the closest lymph nodes, it is called Stage II. In Stage III, the cancer has generally spread to the lymph nodes in near proximity to the site of the primary lesion. Cancers that have spread to a distant part of the body, such as the liver, bone, brain or another site, are called Stage IV, the most advanced stage.

[0256] Currently, the determination of staging is done using pathological techniques and is based more on the presence or absence of malignant tissue rather than the characteristics of the tumor type. Presence or absence of malignant tissue is based primarily on the gross morphology of the cells in the areas biopsied. The polynucleotides of the invention can facilitate fine-tuning of the staging process by identifying markers for the aggresivity of a cancer, e.g. the metastatic potential, as well as the presence in different areas of the body. Thus, a Stage II cancer with a polynucleotide signifying a high metastatic potential cancer can be used to change a borderline Stage II tumor to a Stage III tumor, justifying more aggressive therapy. Conversely, the presence of a polynucleotide signifying a lower metastatic potential allows more conservative staging of a tumor.

[0257] Grading of Cancers.

[0258] Grade is a term used to describe how closely a tumor resembles normal tissue of its same type. Based on the microscopic appearance of a tumor, pathologists will identify the grade of a tumor based on parameters such as cell morphology, cellular organization, and other markers of differentiation. As a general rule, the grade of a tumor corresponds to its rate of growth or aggressiveness. That is, undifferentiated or high-grade tumors grow more quickly than well differentiated or low-grade tumors. Information about tumor grade is useful in planning treatment and predicting prognosis.

[0259] The American Joint Commission on Cancer has recommended the following guidelines for grading tumors: 1) GX Grade cannot be assessed; 2) G1 Well differentiated; G2 Moderately well differentiated; 3) G3 Poorly differentiated; 4) G4 Undifferentiated. Although grading is used by pathologists to describe most cancers, it plays a more important role in treatment planning for certain types than for others. An example is the Gleason system that is specific for prostate cancer, which uses grade numbers to describe the degree of differentiation. Lower Gleason scores indicate well-differentiated cells. Intermediate scores denote tumors with moderately differentiated cells. Higher scores describe poorly differentiated cells. Grade is also important in some types of brain tumors and soft tissue sarcomas.

[0260] The polynucleotides of the invention can be especially valuable in determining the grade of the tumor, as they not only can aid in determining the differentiation status of the cells of a tumor, they can also identify factors other than differentiation that are valuable in determining the aggressivity of a tumor, such as metastatic potential.

[0261] Familial Cancer Genes.

[0262] A number of cancer syndromes are linked to Mendelian inheritance of a predisposition to develop particular cancers. The following table contains a list of cancer types that can be inherited, and for which the gene or genes responsible have been identified. Most of the cancer types listed can occur as part of several different genetic conditions, each caused by alterations in a different gene.

| Cancer Type | Genetic Condition | Gene |
|---|---|---|
| Brain | Li-Fraumeni syndrome | TP53 |
| | Neurofibromatosis 1 | NF1 |
| | Neurofibromatosis 2 | NF2 |
| | von Hippel-Lindau syndrome | VHL |
| | Tuberous sclerosis 2 | TSC2 |
| Breast | Hereditary breast/ovarian cancer 1 | BRCA1 |
| | Hereditary breast/ovarian cancer 2 | BRCA2 |
| | Li-Fraumeni syndrome | TP53 |
| | Ataxia telangiectasia | ATM |
| Colon | Familial adenomatous polyposis (FAP) | APC |
| | Hereditary non-polyposis colon cancer (HNPCC) 1 | HMSH2 |
| | Hereditary non-polyposis colon cancer (HNPCC) 2 | hMLH1 |
| | Hereditary non-polyposis colon cancer (HNPCC) 3 | hPMS1 |
| | Hereditary non-polyposis colon cancer (HNPCC) 4 | hPMS2 |
| Endocrine | Multiple endocrine neoplasia 1 (MEN1) | MEN1 |
| (parathyroid, pituitary, GI endocrine) | | |
| Endocrine | Multiple endocrine neoplasia 2 (MEN2) | RET |
| (pheochromacytoma, medullary thyroid) | | |
| Endometrial | Hereditary non-polyposis colon cancer (HNPCC) 1 | hMSH2 |
| | Hereditary non-polyposis colon cancer (HNPCC) 2 | hMLH1 |
| | Hereditary non-polyposis colon cancer (HNPCC) 3 | hPMS1 |
| | Hereditary non-polyposis colon cancer (HNPCC) 4 | hPMS2 |
| Eye | Hereditary retinoblastoma | RB1 |
| Hematologic | Li-Fraumeni syndrome | TP53 |
| (lymphomas and leukemia) | Ataxia telangiectasia | ATM |
| Kidney | Hereditary Wilms' tumor | WT1 |
| | von Hippel-Lindau syndrome | VHL |
| | Tuberous sclerosis 2 | TSC2 |
| Ovary | Hereditary breast/ovarian cancer 1 | BRCA1 |
| | Hereditary breast/ovarian cancer 2 | BRCA2 |
| Sarcoma | Hereditary retinoblastoma | RB1 |
| | Li-Fraumeni syndrome | TP53 |
| | Neurofibromatosis 1 | NF1 |
| Skin | Hereditary melanoma 1 | CDKN2 |
| | Hereditary melanoma 2 | CDK4 |
| | Basal cell naevus (Gorlin) syndrome | PTCH |
| Stomach | Hereditary non-polyposis colon cancer (HNPCC) 1 | hMSH2 |
| | Hereditary non-polyposis colon cancer (HNPCC) 2 | hMLH1 |
| | Hereditary non-polyposis colon cancer (HNPCC) 3 | hPMS1 |
| | Hereditary non-polyposis colon cancer (HNPCC) 4 | hPMS2 |

[0263] The polynucleotides of the invention can be especially useful to monitor patients having any of the above syndromes to detect potentially malignant events at a molecular level before they are detectable at a gross morphological level. As can be seen from the table, a number of genes are involved in multiple forms of cancer. Thus, a polynucleotide of the invention identified as important for metastatic colon cancer can also have clinical implications for a patient diagnosed with stomach cancer or endometrial cancer.

[0264] Lung Cancer.

[0265] Lung cancer is one of the most common cancers in the United States, accounting for about 15 percent of all cancer cases, or 170,000 new cases each year. At this time, over half of the lung cancer cases in the United States are in men, but the number found in women is increasing and will soon equal that in men. Today more women die of lung cancer than of breast cancer. Lung cancer is especially difficult to diagnose and treat because of the large size of the lungs, which allows cancer to develop for years undetected. In fact, lung cancer can spread outside the lungs without causing any symptoms. Adding to the confusion, the most common symptom of lung cancer, a persistent cough, can often be mistaken for a cold or bronchitis.

[0266] Although there are more than a dozen different kinds of lung cancer, the two main types of lung cancer are small cell and nonsmall cell, which encompass about 90% of all lung cancer cases. Small cell carcinoma (also called oat cell carcinoma), which usually starts in one of the larger bronchial tubes, grows fairly rapidly, and is likely to be large by the time of diagnosis. Nonsmall cell lung cancer (NSCLC) is made up of three general subtypes of lung cancer. Epidermoid carcinoma (also called squamous cell carcinoma) usually starts in one of the larger bronchial tubes and grows relatively slowly. The size of these tumors can range from very small to quite large. Adenocarcinoma starts growing near the outside surface of the lung and can vary in both size and growth rate. Some slowly growing adenocarcinomas are described as alveolar cell cancer. Large cell carcinoma starts near the surface of the lung, grows rapidly, and the growth is usually fairly large when diagnosed. Other less common forms of lung cancer are carcinoid, cylindroma, mucoepidermoid, and malignant mesothelioma.

[0267] Currently, CT scans, MRIs, X-rays, sputum cytology, and biopsies are used to diagnose nonsmall cell lung cancer. The form and cellular origin of the lung cancer is diagnosed primarily through biopsy from either a surgical biopsy or a needle aspiration of lung tissue, and usually the biopsy is prompted from an abnormality identified on an X-ray. In some cases, sputum cytology can reveal lung cancers in patients with normal X-rays or can determine the type of lung cancer, but because it cannot pinpoint the tumor's location, a positive sputum cytology test is usually followed by further tests. Since these tests are based in large part on gross morphology of the tissue, the diagnosis of a particular kind of tumor is largely subjective, and the diagnosis can vary significantly between clinicians.

[0268] The polynucleotides of the invention can be used to distinguish types of lung cancer as well as identifying traits specific to a certain patient's cancer. For example, if the patient's biopsy expresses a polynucleotide that is associated with a low metastatic potential, it may justify leaving a larger portion of the patient's lung in surgery to remove the lesion. Alternatively, a smaller lesion with expression of a polynucleotide that is associated with high metastatic potential may justify a more radical removal of lung tissue and/or the surrounding lymph nodes, even if no metastasis can be identified through pathological examination.

[0269] Similarly, the expression of polynucleotides of the invention can be used in the diagnosis, prognosis and management of colorectal cancer. The differential expression of a polynucleotide in hyperplasia can be used as a diagnostic marker for metastatic lung cancer. The polynucleotides of the invention that would be especially useful for this purpose are those that exhibit differential expression between high metastatic versus low metastatic lung cancer, i.e. SEQ ID NOS: 9, 34, 42, 62, 74, 106, 119, 135, 154, 160, 260, 308, 323, 349, 361, 369, 371, 381, 395, and 400. Detection of malignant lung cancer with a higher metastatic potential can be determined using expression levels of any of these sequences alone or in combination with the levels of expression of other known genes.

[0270] Breast Cancer.

[0271] The National Cancer Institute (NCI) estimates that about 1 in 8 women in the United States will develop breast cancer during her lifetime. Clinical breast examination and mammography are recommended as combined modalities for breast cancer screening, and the nature of the cancer will often depend upon the location of the tumor and the cell type from which the tumor is derived. The majority of breast cancers are adenocarcinomas subtypes, which can be summarized as follows:

[0272] Ductal carcinoma in situ (DCIS): Ductal carcinoma in situ is the most common type of noninvasive breast cancer. In DCIS, the malignant cells have not metastasized through the walls of the ducts into the fatty tissue of the breast. Comedocarcinoma is a type of DCIS that is more likely than other types of DCIS to come back in the same area after lumpectomy. It is more closely linked to eventual development of invasive ductal carcinoma than other forms of DCIS.

[0273] Infiltrating (or invasive) ductal carcinoma (IDC): this type of cancer has metastasized through the wall of the duct and invaded the fatty tissue of the breast. At this point, it has the potential to use the lymphatic system and bloodstream for metastasis to more distant parts of the body. Infiltrating ductal carcinoma accounts for about 80% of breast cancers.

[0274] Lobular carcinoma in situ (LCIS): While not a true cancer, LCIS (also called lobular neoplasia) is sometimes classified as a type of noninvasive breast cancer. It does not penetrate through the wall of the lobules. Although it does not itself usually become an invasive cancer, women with this condition have a higher risk of developing an invasive breast cancer in the same breast, or in the opposite breast.

[0275] Infiltrating (or invasive) lobular carcinoma (ILC): ILC is similar to IDC, in that it has the potential metastasize elsewhere in the body. About 10% to 15% of invasive breast cancers are invasive lobular carcinomas. ILC can be more difficult to detect by mammogram than IDC.

[0276] Inflammatory breast cancer: This rare type of invasive breast cancer accounts for about 1% of all breast cancers and is extremely aggressive. Multiple skin symptoms associated with this cancer are caused by cancer cells blocking lymph vessels or channels in the skin over the breast.

[0277] Medullary carcinoma: This special type of infiltrating breast cancer has a relatively well defined, distinct boundary between tumor tissue and normal tissue. It accounts for about 5% of breast cancers. The prognosis for this kind of breast cancer is better than for other types of invasive breast cancer.

[0278] Mucinous carcinoma: This rare type of invasive breast cancer originates from mucus-producing cells. The prognosis for mucinous carcinoma is better than for the more common types of invasive breast cancer.

[0279] Paget's disease of the nipple: This type of breast cancer starts in the ducts and spreads to the skin of the nipple and the areola. It is a rare type of breast cancer, occurring in only 1% of all cases. Paget's disease can be associated with in situ carcinoma, or with infiltrating breast carcinoma. If no lump can be felt in the breast tissue, and the biopsy shows DCIS but no invasive cancer, the prognosis is excellent.

[0280] Phyllodes tumor: This very rare type of breast tumor forms from the stroma of the breast, in contrast to carcinomas which develop in the ducts or lobules. Phyllodes (also spelled phylloides) tumors are usually benign, but are malignant on rare occasions. Nevertheless, malignant phyllodes tumors are very rare and less than 10 women per year in the US die of this disease. Benign phyllodes tumors are successfully treated by removing the mass and a narrow margin of normal breast tissue.

[0281] Tubular carcinoma: Accounting for about 2% of all breast cancers, tubular carcinomas are a special type of infiltrating breast carcinoma. They have a better prognosis than usual infiltrating ductal or lobularcarcinomas.

[0282] High-quality mammography combined with clinical breast exam remains the only screening method clearly tied to reduction in breast cancer mortality. Lower dose x-rays, digitized computer rather than film images, and the use of computer programs to assist diagnosis, are almost ready for widespread dissemination. Other technologies also are being developed, including magnetic resonance imaging and ultrasound. In addition, a very low radiation exposure technique, positron emission tomography has the potential for detecting early breast cancer.

[0283] It is also possible to differentiate between non-cancerous breast tissue and malignant breast tissue by analyzing differential gene expression between tissues. In addition, there may be several possible alterations that lead to the various possible types of breast cancer. The different types of breast tumors (e.g., invasive vs. non-invasive, ductal vs. axillary lymph node) can be differentiable from one another by the identification of the differences in genes expressed by different types of breast tumor tissues (Porter-Jordan et al., Hematol Oncol Clin North Am (1994) 8:73). Breast cancer can thus be generally diagnosed by detection of expression of a gene or genes associated with breast tumors. Where enough information is available about the differential gene expression between various types of breast tumor tissues, the specific type of breast tumor can also be diagnosed.

[0284] For example, increased estrogen receptor (ER) expression in normal breast epithileum, while not itself indicative of malignant tissue, is a known risk marker for development of breast cancer. Khan S A et al., Cancer Res (1994) 54:993. Malignant breast cancer is often divided into two groups, ER-positive and ER-negative, based on the estrogen receptor status of the tissue. The ER status represents different survival length and response to hormone therapy, and is thought to represent either: 1) an indicator of different stages of the disease, or 2) an indicator that allows differentiation between two similar but distinct diseases. K. Zhu et al., Med. Hypoth. (1997) 49:69. A number of other genes are known to vary expression between either different stages of cancer or different types of similar breast cancer.

[0285] Similarly, the expression of polynucleotides of the invention can be used in the diagnosis and management of breast cancer. The differential expression of a polynucleotide in human breast tumor tissue can be used as a diagnostic marker for human breast cancer. The polynucleotides of the invention that would be especially useful for this purpose are those that exhibit differential expression between breast cancer tissue with a high metastatic potential and a low metastatic potential, ie. SEQ ID NOS: 9, 42, 52, 62, 65, 66, 68, 114, 123, 144, 172, 178, 214, 219, 223, 258, 317, and 379. Detection of breast cancer can be determined using expression levels of any of these sequences alone or in combination. Determination of the aggressive nature and/or the metastatic potential of a breast cancer can also be determined by comparing levels of one or more polynucleotides of the invention and comparing levels of another sequence known to vary in cancerous tissue, e.g. ER expression. In addition, development of breast cancer can be detected by examining the ratio of SEQ ID NO: to the levels of steroid hormones (e.g., testosterone or estrogen) or to other hormones (e.g., growth hormone, insulin). Thus expression of specific marker polynucleotides can be used to discriminate between normal and cancerous breast tissue, to discriminate between breast cancers with different cells of origin, to discriminate between breast cancers with different potential metastatic rates, etc.

[0286] Diagnosis of breast cancer can also involve comparing the expression of a polynucleotide of the invention with the expression of other sequences in non-malignant breast tissue samples in comparison to one or more forms of the diseased tissue. A comparison of expression of one or more polynucleotides of the invention between the samples provides information on relative levels of these polynucleotides as well as the ratio of these polynucleotides to the expression of other sequences in the tissue of interest compared to normal.

[0287] This risk of breast cancer is elevated significantly by the presence of an inherited risk for breast cancer, such as a mutation in BRCA-1 or BRCA-2. New diagnostic tools are being developed to address the needs of higher risk patients to complement mammography and physical examinations for early detection of breast cancer, particularly among younger women. The presence of antigen or expression markers in nipple aspirate fluid (NAF) samples collected from one or both breasts can be useful for useful for risk assessment or early cancer detection. Breast cytology and biomarkers obtained by random fine needle aspiration have been used to identify hyperplasia with atypia and overexpression of p53 and EGFR. The polynucleotides of the invention can be used in multivariate analysis with expression studies with genes such as p53 and EGFR as risk predictors and as surrogate endpoint biomarkers for breast cancer.

[0288] As well as being used for diagnosis and risk assessment, the expression of certain genes can also correlated to prognosis of a disease state. The expression of particular gene have been used as prognostic indicators for breast cancer including increased expression of c-erbB-2, pS2, ER, progesterone receptor, epidermal growth factor receptor (EGFR), neu, myc, bcl-2, int2, cytosolic tyrosine kinase, cyclin E, prad-1, hst, uPA, PAI-1, PAI-2, cathepsin D, as well as the presence of a number of cancer-specific antigens, e.g. CEA, CA M26, CA M29 and CA 15.3. Davis, Br. J. Biomed Sci. (1996) 53:157. Poor prognosis has also been linked to a decrease in expression of certain genes, such as pS3, Rb, nm23. The expression of the polynucleotides of the invention can be of prognostic value for determining the metastatic potential of a malignant breast cancer, as this molecules are differentially expressed between high and low metastatic potential tissues tumors. The levels of these polynucleotides in patients with malignant breast cancer can compared to normal tissue, malignant tissue with a known high potential metastatic level, and malignant tissue with a known lower level of metastatic potential to provide a prognosis for a particular patient. Such a prognosis is predictive of the extent and nature of the cancer. The determined prognosis is useful in determining the prognosis of a patient with breast cancer, both for initial treatment of the disease and for longer-term monitoring of the same patient. If samples are taken from the same individual over a period of time, differences in polynucleotide expression that are specific to that patient can be identified and closely watched.

[0289] Colon Cancer.

[0290] Colorectal cancer is one of the most common neoplasms in humans and perhaps the most frequent form of hereditary neoplasia. Prevention and early detection are key factors in controlling and curing colorectal cancer. Indeed, colorectal cancer is the second most preventable cancer, after lung cancer. Colorectal cancer begins as polyps, which are small, benign growths of cells that form on the inner lining of the colon. Over a period of several years, some of these polyps accumulate additional mutations and become cancerous. About 20 percent of all cases of colon cancer are thought to be related to heredity. Currently, multiple familial colorectal cancer disorders have been identified, which are summarized as follows:

[0291] Familial adenomatous polyposis (FAP): This condition results in a person having hundreds or even thousands of polyps in the colon and rectum that usually first appear during the teenage years. Cancer nearly always develops in one or more of these polyps between the ages of 30 and 50.

[0292] Gardner's syndrome: Like FAP, Gardner's syndrome results in polyps and colorectal cancers that develop at a young age. It can also cause benign tumors of the skin, soft connective tissue and bones.

[0293] Hereditary nonpolyposis colon cancer (HNPCC): People with this condition tend to develop colorectal cancer at a young age, without first having many polyps. HNPCC has an autosomal dominant pattern of inheritance with variable but high penetrance estimated to be about 90%. HNPCC underlies 0.5%-10% of all cases of colorectal cancer. An understanding of the mechanisms behind the development of HNPCC is emerging, and genetic presymptomatic testing, now being conducted in research settings, soon will be available on a widespread basis for individuals identified at risk for this disease.

[0294] Familial colorectal cancer in Ashkenazi Jews: Recent research has found an inherited tendency to developing colorectal cancer among some Jews of Eastern European descent. Like people with FAP, Gardner's syndrome, and HNPCC, their increased risk is due to an inherited mutation present in about 6% of American Jews.

[0295] Several tests are currently used to screen for colorectal cancer, including digital rectal examination, fecal occult blood test, sigmoidoscopy, colonoscopy, virtual colonoscopy and MRI. Each of these tests identifies potential colorectal cancer lesions, or a risk of development of these lesions, at a fairly gross morphological level.

[0296] The sequential alteration of a number of genes is associated with malignant adenocarcinoma, including the genes DCC, p53, ras, and FAP. For a review, see e.g. Fearon E R, et al., Cell (1990) 61(5):759; Hamilton S R et al., Cancer (1993) 72:957; Bodmer W, et al., Nat Genet. (1994) 4(3):217; Fearon E R, Ann NY Acad Sci. (1995) 768:101. Molecular genetic alterations are thus promising as potential diagnostic and prognostic indicators in colorectal carcinoma and molecular genetics of colorectal carcinoma since it is possible to differentiate between different types of colorectal neoplasias using molecular markers. Colorectal cancer can thus be generally diagnosed by detection of expression of a gene or genes associated with colorectal tumors.

[0297] Similarly, the expression of polynucleotides of the invention can be used in the diagnosis, prognosis and management of colorectal cancer. The differential expression of a polynucleotide in hyperplasia can be used as a diagnostic marker for colon cancer. The polynucleotides of the invention that would be especially useful for this purpose are those that exhibit differential expression between malignant metastatic colon cancer and normal patient tissue, i.e. SEQ ID NOS: 52, 119, 172, 288. Detection of malignant colon cancer can be determined using expression levels of any of these sequences alone or in combination with the levels of expression.

[0298] Determination of the aggressive nature and/or the metastatic potential of a colon cancer can also be determined by comparing levels of one or more polynucleotides of the invention and comparing total levels of another sequence known to vary in cancerous tissue, e.g. p53 expression. In addition, development of colon cancer can be detected by examining the ratio of any of the polynucleotides of the invention to the levels of oncogenes (e.g. ras) or tumor suppressor genes (e.g. FAP or p53). Thus expression of specific marker polynucleotides can be used to discriminate between normal and cancerous breast tissue, to discriminate between breast cancers with different cells of origin, to discriminate between breast cancers with different potential metastatic rates, etc.

[0299] G. Use of Polynucleotides to Screen for Peptide Analogs and Antagonists

[0300] Polypeptides encoded by the instant polynucleotides and corresponding full length genes can be used to screen peptide libraries to identify binding partners, such as receptors, from among the encoded polypeptides.

[0301] A library of peptides can be synthesized following the methods disclosed in U.S. Pat. No. 5,010,175 ('175), and in WO 91/17823. As described below in brief, one prepares a mixture of peptides, which is then screened to identify the peptides exhibiting the desired signal transduction and receptor binding activity. In the '175 method, a suitable peptide synthesis support (e.g., a resin) is coupled to a mixture of appropriately protected, activated amino acids. The concentration of each amino acid in the reaction mixture is balanced or adjusted in inverse proportion to its coupling reaction rate so that the product is an equimolar mixture of amino acids coupled to the starting resin. The bound amino acids are then deprotected, and reacted with another balanced amino acid mixture to form an equimolar mixture of all possible dipeptides. This process is repeated until a mixture of peptides of the desired length (e.g., hexamers) is formed. Note that one need not include all amino acids in each step: one can include only one or two amino acids in some steps (e.g., where it is known that a particular amino acid is essential in a given position), thus reducing the complexity of the mixture. After the synthesis of the peptide library is completed, the mixture of peptides is screened for binding to the selected polypeptide. The peptides are then tested for their ability to inhibit or enhance activity. Peptides exhibiting the desired activity are then isolated and sequenced. The method described in WO 91/17823 is similar. However, instead of reacting the synthesis resin with a mixture of activated amino acids, the resin is divided into twenty equal portions (or into a number of portions corresponding to the number of different amino acids to be added in that step), and each amino acid is coupled individually to its portion of resin. The resin portions are then combined, mixed, and again divided into a number of equal portions for reaction with the second amino acid. In this manner, each reaction can be easily driven to completion. Additionally, one can maintain separate “subpools” by treating portions in parallel, rather than combining all resins at each step. This simplifies the process of determining which peptides are responsible for any observed receptor binding or signal transduction activity.

[0302] In such cases, the subpools containing, e.g., 1-2,000 candidates each are exposed to one or more polypeptides of the invention. Each subpool that produces a positive result is then resynthesized as a group of smaller subpools (sub-subpools) containing, e.g., 20-100 candidates, and reassayed. Positive sub-subpools can be resynthesized as individual compounds, and assayed finally to determine the peptides that exhibit a high binding constant. These peptides can be tested for their ability to inhibit or enhance the native activity. The methods described in WO 91/7823 and U.S. Pat. No. 5,194,392 (herein incorporated by reference) enable the preparation of such pools and subpools by automated techniques in parallel, such that all synthesis and resynthesis can be performed in a matter of days.

[0303] Peptide agonists or antagonists are screened using any available method, such as signal transduction, antibody binding, receptor binding, mitogenic assays, chemotaxis assays, etc. The methods described herein are presently preferred. The assay conditions ideally should resemble the conditions under which the native activity is exhibited in vivo, that is, under physiologic pH, temperature, and ionic strength. Suitable agonists or antagonists will exhibit strong inhibition or enhancement of the native activity at concentrations that do not cause toxic side effects in the subject. Agonists or antagonists that compete for binding to the native polypeptide can require concentrations equal to or greater than the native concentration, while inhibitors capable of binding irreversibly to the polypeptide can be added in concentrations on the order of the native concentration.

[0304] The end results of such screening and experimentation will be at least one novel polypeptide binding partner, such as a receptor, encoded by a gene or a cDNA corresponding to a polynucleotide of the invention, and at least one peptide agonist or antagonist of the novel binding partner. Such agonists and antagonists can be used to modulate, enhance, or inhibit receptor function in cells to which the receptor is native, or in cells that possess the receptor as a result of genetic engineering. Further, if the novel receptor shares biologically important characteristics with a known receptor, information about agonist/antagonist binding can facilitate development of improved agonists/antagonists of the known receptor.

[0305] H. Pharmaceutical Compositions and Therapeutic Uses

[0306] Pharmaceutical compositions can comprise polypeptides, antibodies, or polynucleotides of the claimed invention. The pharmaceutical compositions will comprise a therapeutically effective amount of either polypeptides, antibodies, or polynucleotides of the claimed invention.

[0307] The term “therapeutically effective amount” as used herein refers to an amount of a therapeutic agent to treat, ameliorate, or prevent a desired disease or condition, or to exhibit a detectable therapeutic or preventative effect. The effect can be detected by, for example, chemical markers or antigen levels. Therapeutic effects also include reduction in physical symptoms, such as decreased body temperature. The precise effective amount for a subject will depend upon the subject's size and health, the nature and extent of the condition, and the therapeutics or combination of therapeutics selected for administration. Thus, it is not useful to specify an exact effective amount in advance. However, the effective amount for a given situation is determined by routine experimentation and is within the judgment of the clinician. For purposes of the present invention, an effective dose will generally be from about 0.01 mg/kg to 50 mg/kg or 0.05 mg/kg to about 10 mg/kg of the DNA constructs in the individual to which it is administered.

[0308] A pharmaceutical composition can also contain a pharmaceutically acceptable carrier. The term “pharmaceutically acceptable carrier” refers to a carrier for administration of a therapeutic agent, such as antibodies or a polypeptide, genes, and other therapeutic agents. The term refers to any pharmaceutical carrier that does not itself induce the production of antibodies harmful to the individual receiving the composition, and which can be administered without undue toxicity. Suitable carriers can be large, slowly metabolized macromolecules such as proteins, polysaccharides, polylactic acids, polyglycolic acids, polymeric amino acids, amino acid copolymers, and inactive virus particles. Such carriers are well known to those of ordinary skill in the art.

[0309] Pharmaceutically acceptable salts can be used therein, for example, mineral acid salts such as hydrochlorides, hydrobromides, phosphates, sulfates, and the like; and the salts of organic acids such as acetates, propionates, malonates, benzoates, and the like. A thorough discussion of pharmaceutically acceptable excipients is available in Remington's Pharmaceutical Sciences (Mack Pub. Co., N.J. 1991).

[0310] Pharmaceutically acceptable carriers in therapeutic compositions can include liquids such as water, saline, glycerol and ethanol. Auxiliary substances, such as wetting or emulsifying agents, pH buffering substances, and the like, can also be present in such vehicles. Typically, the therapeutic compositions are prepared as injectables, either as liquid solutions or suspensions; solid forms suitable for solution in, or suspension in, liquid vehicles prior to injection can also be prepared. Liposomes are included within the definition of a pharmaceutically acceptable carrier.

[0311] Delivery Methods.

[0312] Once formulated, the compositions of the invention can be (1) administered directly to the subject (e.g., as polynucleotide or polypeptides); (2) delivered ex vivo, to cells derived from the subject (e.g., as in ex vivo gene therapy); or (3) delivered in vitro for expression of recombinant proteins (e.g., polynucleotides). Direct delivery of the compositions will generally be accomplished by injection, either subcutaneously, intraperitoneally, intravenously or intramuscularly, or delivered to the interstitial space of a tissue. The compositions can also be administered into a tumor or lesion. Other modes of administration include oral and pulmonary administration, suppositories, and transdermal applications, needles, and gene guns or hyposprays. Dosage treatment can be a single dose schedule or a multiple dose schedule.

[0313] Methods for the ex vivo delivery and reimplantation of transformed cells into a subject are known in the art and described in e.g., International Publication No. WO 93/14778. Examples of cells useful in ex vivo applications include, for example, stem cells, particularly hematopoetic, lymph cells, macrophages, dendritic cells, or tumor cells. Generally, delivery of nucleic acids for both ex vivo and in vitro applications can be accomplished by, for example, dextran-mediated transfection, calcium phosphate precipitation, polybrene mediated transfection, protoplast fusion, electroporation, encapsulation of the polynucleotide(s) in liposomes, and direct microinjection of the DNA into nuclei, all well known in the art.

[0314] Once a gene corresponding to a polynucleotide of the invention has been found to correlate with a proliferative disorder, such as neoplasia, dysplasia, and hyperplasia, the disorder can be amenable to treatment by administration of a therapeutic agent based on the provided polynucleotide or corresponding polypeptide.

[0315] Preparation of antisense polynucleotides is discussed above. Neoplasias that are treated with the antisense composition include, but are not limited to, cervical cancers, melanomas, colorectal adenocarcinomas, Wilms' tumor, retinoblastoma, sarcomas, myosarcomas, lung carcinomas, leukemias, such as chronic myelogenous leukemia, promyelocytic leukemia, monocytic leukemia, and myeloid leukemia, and lymphomas, such as histiocytic lymphoma. Proliferative disorders that are treated with the therapeutic composition include disorders such as anhydric hereditary ectodermal dysplasia, congenital alveolar dysplasia, epithelial dysplasia of the cervix, fibrous dysplasia of bone, and mammary dysplasia. Hyperplasias, for example, endometrial, adrenal, breast, prostate, or thyroid hyperplasias or pseudoepitheliomatous hyperplasia of the skin, are treated with antisense therapeutic compositions based upon a polynucleotide of the invention. Even in disorders in which mutations in the corresponding gene are not implicated, downregulation or inhibition of expression of a gene corresponding to a polynucleotide of the invention can have therapeutic application. For example, decreasing gene expression can help to suppress tumors in which enhanced expression of the gene is implicated.

[0316] Both the dose of the antisense composition and the means of administration are determined based on the specific qualities of the therapeutic composition, the condition, age, and weight of the patient, the progression of the disease, and other relevant factors. Administration of the therapeutic antisense agents of the invention includes local or systemic administration, including injection, oral administration, particle gun or catheterized administration, and topical administration. Preferably, the therapeutic antisense composition contains an expression construct comprising a promoter and a polynucleotide segment of at least 12, 22, 25, 30, or 35 contiguous nucleotides of the antisense strand of a polynucleotide disclosed herein. Within the expression construct, the polynucleotide segment is located downstream from the promoter, and transcription of the polynucleotide segment initiates at the promoter.

[0317] Various methods are used to administer the therapeutic composition directly to a specific site in the body. For example, a small metastatic lesion is located and the therapeutic composition injected several times in several different locations within the body of tumor. Alternatively, arteries which serve a tumor are identified, and the therapeutic composition injected into such an artery, in order to deliver the composition directly into the tumor. A tumor that has a necrotic center is aspirated and the composition injected directly into the now empty center of the tumor. The antisense composition is directly administered to the surface of the tumor, for example, by topical application of the composition. X-ray imaging is used to assist in certain of the above delivery methods.

[0318] Receptor-mediated targeted delivery of therapeutic compositions containing an antisense polynucleotide, subgenomic polynucleotides, or antibodies to specific tissues is also used. Receptor-mediated DNA delivery techniques are described in, for example, Findeis et al., Trends Biotechnol. (1993) 11:202; Chiou et al., Gene Therapeutics: Methods And Applications OfDirect Gene Transfer (J. A. Wolff, ed.) (1994); Wu et al., J. Biol. Chem. (1988) 263:621; Wu et al., J. Biol. Chem. (1994) 269:542; Zenke et al., Proc. Natl. Acad. Sci. (USA) (1990) 87:3655; Wu et al., J. Biol. Chem. (1991) 266:338. Preferably, receptor-mediated targeted delivery of therapeutic compositions containing antibodies of the invention is used to deliver the antibodies to specific tissue.

[0319] Therapeutic compositions containing antisense subgenomic polynucleotides are administered in a range of about 100 ng to about 200 mg of DNA for local administration in a gene therapy protocol. Concentration ranges of about 500 ng to about 50 mg, about 1 μg to about 2 mg, about 5 μg to about 500 μg, and about 20 μg to about 100 μg of DNA can also be used during a gene therapy protocol. Factors such as method of action and efficacy of transformation and expression are considerations which will affect the dosage required for ultimate efficacy of the antisense subgenomic polynucleotides. Where greater expression is desired over a larger area of tissue, larger amounts of antisense subgenomic polynucleotides or the same amounts readministered in a successive protocol of administrations, or several administrations to different adjacent or close tissue portions of, for example, a tumor site, may be required to effect a positive therapeutic outcome. In all cases, routine experimentation in clinical trials will determine specific ranges for optimal therapeutic effect. A more complete description of gene therapy vectors, especially retroviral vectors, is contained in U.S. Ser. No. 08/869,309, which is expressly incorporated herein, and in section G below.

[0320] For polynucleotide-related genes encoding polypeptides or proteins with anti-inflammatory activity, suitable use, doses, and administration are described in U.S. Pat. No. 5,654,173. Therapeutic agents also include antibodies to proteins and polypeptides encoded by the polynucleotides of the invention and related genes, as described in U.S. Pat. No. 5,654,173.

[0321] I. Gene Therapy

[0322] The therapeutic polynucleotides and polypeptides of the present invention can be utilized in gene delivery vehicles. The gene delivery vehicle can be of viral or non-viral origin (see generally, Jolly, Cancer Gene Therapy (1994) 1:51; Kimura, Human Gene Therapy (1994) 5:845; Connelly, Human Gene Therapy (1995) 1:185; and Kaplitt, Nature Genetics (1994) 6:148). Gene therapy vehicles for delivery of constructs including a coding sequence of a therapeutic of the invention can be administered either locally or systemically. These constructs can utilize viral or non-viral vector approaches. Expression of such coding sequences can be induced using endogenous mammalian or heterologous promoters. Expression of the coding sequence can be either constitutive or regulated.

[0323] The present invention can employ recombinant retroviruses which are constructed to carry or express a selected nucleic acid molecule of interest. Retrovirus vectors that can be employed include those described in EP 0 415 731; WO 90/07936; WO 94/03622; WO 93/25698; WO 93/25234; U.S. Pat. No. 5, 219,740; WO 93/11230; WO 93/10218; Vile and Hart, Cancer Res. (1 993) 53:3 860; Vile et al., Cancer Res. (1 993) 53:962; Ram et al., Cancer Res. (1993) 53:83; Takamiya et al., J. Neurosci. Res. (1992) 33:493; Baba et al., J. Neurosurg. (1993) 79:729; U.S. Pat. No. 4,777,127; GB Patent No. 2,200,651; and EP 0 345 242. Preferred recombinant retroviruses include those described in WO 91/02805.

[0324] Packaging cell lines suitable for use with the above-described retroviral vector constructs can be readily prepared (see, e.g., WO 95/30763 and WO 92/05266), and used to create producer cell lines (also termed vector cell lines) for the production of recombinant vector particles. Within particularly preferred embodiments of the invention, packaging cell lines are made from human (such as HTT1080 cells) or mink parent cell lines, thereby allowing production of recombinant retroviruses that can survive inactivation in human serum.

[0325] The present invention also employs alphavirus-based vectors that can function as gene delivery vehicles. Such vectors can be constructed from a wide variety of alphaviruses, including, for example, Sindbis virus vectors, Semliki forest virus (ATCC VR-67; ATCC VR-1247), Ross River virus (ATCC VR-373; ATCC VR-1246) and Venezuelan equine encephalitis virus (ATCC VR-923; ATCC VR-1250; ATCC VR 1249; ATCC VR-532). Representative examples of such vector systems include those described in U.S. Pat. Nos. 5,091,309; 5,217,879; and 5,185,440; WO 92/10578; WO 94/21792; WO 95/27069; WO 95/27044; and WO 95/07994. Gene delivery vehicles of the present invention can also employ parvovirus such as adeno-associated virus (AAV) vectors. Representative examples include the AAV vectors disclosed by Srivastava in WO 93/09239, Samulski et al., J. Virol. (1989) 63:3822; Mendelson et al., Virol. (1988)166:154; and Flotte et al., PNAS (1993) 90:10613.

[0326] Representative examples of adenoviral vectors include those described by Berkner, Biotechniques (1988) 6:616; Rosenfeld et al., Science (1991) 252:431; WO 93/19191; Kolls et al., PNAS (1994) 91:215; Kass-Eisler et al., PNAS (1993) 90:11498; Guzman et al., Circulation (1993) 88:2838; Guzman et al., Cir. Res. (1993) 73:1202; Zabner et al., Cell (1993) 75:207; Li et al., Hum. Gene Ther. (1993) 4:403; Cailaud et al., Eur. J. Neurosci. (1993) 5:1287; Vincent et al., Nat. Genet. (1993) 5:130; Jaffe et al., Nat. Genet. (1992) 1:372; and Levrero et al., Gene (1991) 101:195. Exemplary adenoviral gene therapy vectors employable in this invention also include those described in WO 94/12649, WO 93/03769; WO 93/19191; WO 94/28938; WO 95/11984 and WO 95/00655. Administration of DNA linked to killed adenovirus as described in Curiel, Hum. Gene Ther. (1992)3:147 can be employed.

[0327] Other gene delivery vehicles and methods can be employed, including polycationic condensed DNA linked or unlinked to killed adenovirus alone, for example Curiel, Hum. Gene Ther. (1992) 3:147; ligand linked DNA, for example see Wu, J. Biol. Chem. (1989) 264:16985; eukaryotic cell delivery vehicles cells, for example see U.S. Pat. No. 5,814,482; WO 95/07994; WO 96/17072; WO 95/30763; and WO 97/42338; deposition of photopolymerized hydrogel materials; hand-held gene transfer particle gun, as described in U.S. Pat. No. 5,149,655; ionizing radiation as described in U.S. Pat. No. 5,206,152 and in WO92/11033; nucleic charge neutralization or fusion with cell membranes. Additional approaches are described in Philip, Mol. Cell Biol. (1994) 14:2411, and in Woffendin, Proc. Natl. Acad. Sci. (1994) 91:1581.

[0328] Naked DNA can also be employed. Exemplary naked DNA introduction methods are described in WO 90/11092 and U.S. Pat. No. 5,580,859. Uptake efficiency can be improved using biodegradable latex beads. DNA coated latex beads are efficiently transported into cells after endocytosis initiation by the beads. The method can be improved further by treatment of the beads to increase hydrophobicity and thereby facilitate disruption of the endosome and release of the DNA into the cytoplasm. Liposomes that can act as gene delivery vehicles are described in U.S. Pat. No. 5,422,120; WO 95/13796; WO 94/23697; WO 91/14445; and EP 0524968.

[0329] Further non-viral delivery suitable for use includes mechanical delivery systems such as the approach described in Woffendin et al., Proc. Natl. Acad Sci. USA (1994) 91(24):11581. Moreover, the coding sequence and the product of expression of such can be delivered through deposition of photopolymerized hydrogel materials. Other conventional methods for gene delivery that can be used for delivery of the coding sequence include, for example, use of hand-held gene transfer particle gun, as described in U.S. Pat. No. 5,149,655; use of ionizing radiation for activating transferred gene, as described in U.S. Pat. No. 5,206,152 and WO 92/11033.

[0330] The present invention will now be illustrated by reference to the following examples which set forth particularly advantageous embodiments. However, it should be noted that these embodiments are illustrative and are not to be construed as restricting the invention in any way.

### EXAMPLES

[0331] The present invention is now illustrated by reference to the following examples which set forth particularly advantageous embodiments. However, these embodiments are illustrative and are not meant to be construed as restricting the invention in any way.

### Example 1

### Source of Biological Materials and Overview of Novel Polynucleotides Expressed by the Biological Materials

[0332] Human colon cancer cell line Km12L4-A (Morika, W. A. K. et al., Cancer Research (1988) 48:6863) was used to construct a cDNA library from mRNA isolated from the cells. As described in the above overview, a total of 4,693 sequences expressed by the Km12L4-A cell line were isolated and analyzed; most sequences were about 275-300 nucleotides in length. The KM12L4-A cell line is derived from the KM12C cell line. The KM12C cell line, which is poorly metastatic (low metastatic) was established in culture from a Dukes' stage B₂ surgical specimen (Morikawa et al. Cancer Res. (1988) 48:6863). The KML4-A is a highly metastatic subline derived from KM12C (Yeatman et al. Nucl. Acids. Res. (1995) 23:4007; Bao-Ling et al. Proc. Annu. Meet. Am. Assoc. Cancer. Res. (1995) 21:3269). The KM12C and KM12C-derived cell lines (e.g., KM12L4, KM12L4-A, etc.) are well-recognized in the art as a model cell line for the study of colon cancer (see, e.g., Moriakawa et al., supra; Radinsky et al. Clin. Cancer Res. (1995) 1:19; Yeatman et al., (1995) supra; Yeatman et al. Clin. Exp. Metastasis (1996) 14:246).

[0333] The sequences were first masked to eliminate low complexity sequences using the XBLAST masking program (Clayerie “Effective Large-Scale Sequence Similarity Searches,” In: Computer Methods for Macromolecular Sequence Analysis, Doolittle, ed., Meth. Enzymol. 266:212-227 Academic Press, NY, N.Y. (1996); see particularly Clayerie, in “Automated DNA Sequencing and Analysis Techniques” Adams et al., eds., Chap. 36, p. 267 Academic Press, San Diego, 1994 and Clayerie et al. Comput. Chem. (1993) 17:191). Generally, masking does not influence the final search results, except to eliminate of relative little interest due to their lox complexity, and to eliminate multiple “hits” based on similarity to repetitive regions common to multiple sequences, e.g., Alu repeats. Masking resulted in the elimination of 43 sequences. The remaining sequences were then used in a BLASTN vs. Genbank search with search parameters of greater than 70% overlap, 99% identity, and a p value of less than 1×10⁻⁴⁰, which search resulted in the discarding of 1,432 sequences. Sequences from this search also were discarded if the inclusive parameters were met, but the sequence was ribosomal or vector-derived.

[0334] The resulting sequences from the previous search were classified into three groups (1, 2 and 3 below) and searched in a BLASTX vs. NRP (non-redundant proteins) database search: (1) unknown (no hits in the Genbank search), (2) weak similarity (greater than 45% identity and p value of less than 1×10⁻⁵), and (3) high similarity (greater than 60% overlap, greater than 80% identity, and p value less than 1×10⁻⁵). This search resulted in discard of 98 sequences as having greater than 70% overlap, greater than 99% identity, and p value of less than 1×10₋₄₀.

[0335] The remaining sequences were classified as unknown (no hits), weak similarity, and high similarity (parameters as above). Two searches were performed on these sequences. First, a BLAST vs. EST database search resulted in discard of 1771 sequences (sequences with greater than 99% overlap, greater than 99% similarity and a p value of less than 1×10⁻⁴⁰; sequences with a p value of less than 1×10⁻⁶⁵ when compared to a database sequence of human origin were also excluded). Second, a BLASTN vs. Patent GeneSeq database resulted in discard of 15 sequences (greater than 99% identity; p value less than 1×10⁻⁴⁰; greater than 99% overlap).

[0336] The remaining sequences were subjected to screening using other rules and redundancies in the dataset. Sequences with a p value of less than 1×10⁻¹¹¹ in relation to a database sequence of human origin were specifically excluded. The final result provided the 404 sequences listed in the accompanying Sequence Listing. The Sequence Listing is arranged beginning with sequences with no similarity to any sequence in a database searched, and ending with sequences with the greatest similarity. Each identified polynucleotide represents sequence from at least a partial mRNA transcript. Polynucleotides that were determined to be novel were assigned a sequence identification number.

[0337] The novel polynucleotides and were assigned sequence identification numbers SEQ ID NOS: 1-404. The DNA sequences corresponding to the novel polynucleotides are provided in the Sequence Listing. The majority of the sequences are presented in the Sequence Listing in the 5′ to 3′ direction. A small number, 25, are listed in the Sequence Listing in the 5′ to 3′ direction but the sequence as written is actually 3′ to 5′. These sequences are readily identified with the designation “AR” in the Sequence Name in Table 1 (inserted before the claims). The sequences correctly listed in the 5′ to 3′ direction in the Sequence Listing are designated “AF.” The Sequence Listing filed herewith therefore contains 25 sequences listed in the reverse order, namely SEQ ID NOS:47, 97, 137, 171, 173, 179, 182, 194, 200, 202, 213, 227, 258, 264, 275, 302, 313, 324, 329, 330, 331, 338, 358, 379, and 404.

[0338] Because the provided polynucleotides represent partial mRNA transcripts, two or more polynucleotides of the invention may represent different regions of the same mRNA transcript and the same gene. Thus, if two or more SEQ ID NOS: are identified as belonging to the same clone, then either sequence can be used to obtain the full-length mRNA or gene.

[0339] In order to confirm the sequences of SEQ ID NOS:1-404, inserts of the clones corresponding to these polynucleotides were re-sequenced. These “validation” sequences are provided in SEQ ID NOS:405-800. These validation sequences were often longer than the original polynucleotide sequences. They validate, and thus often provide additional sequence information. Validation sequences can be correlated with the original sequences they validate by identifying those sequences of SEQ ID NOS:1-404 and the validation sequences of SEQ ID NOS:405-800 that share the same clone name in Table 1.

### Example 2

### Results of Public Database Search to Identify Function of Gene Products

[0340] SEQ ID NOS:1-404, as well as the validation sequences SEQ ID NOS:405-800, were translated in all three reading frames to determine the best alignment with the individual sequences. These amino acid sequences and nucleotide sequences are referred, generally, as query sequences, which are aligned with the individual sequences. Query and individual sequences were aligned using the BLAST programs, available over the world wide web at http://ww.ncbi.nlm.nih.gov/BLAST/. Again the sequences were masked to various extents to prevent searching of repetitive sequences or poly-A sequences, using the XBLAST program for masking low complexity as described above in Example 1.

[0341] Table 2 (inserted before the claims) shows the results of the alignments. Table 2 refers to each sequence by its SEQ ID NO:, the accession numbers and descriptions of nearest neighbors from the Genbank and Non-Redundant Protein searches, and the p values of the search results. Table 1 identifies each SEQ ID NO: by SEQ name, clone ID, and cluster. As discussed above, a single cluster includes polynucleotides representing the same gene or gene family, and generally represents sequences encoding the same gene product.

[0342] For each of SEQ ID NOS:1-800, the best alignment to a protein or DNA sequence is included in Table 2. The activity of the polypeptide encoded by SEQ ID NOS:1-800 is the same or similar to the nearest neighbor reported in Table 2. The accession number of the nearest neighbor is reported, providing a reference to the activities exhibited by the nearest neighbor. The search program and database used for the alignment also are indicated as well as a calculation of the p value.

[0343] Full length sequences or fragments of the polynucleotide sequences of the nearest neighbors can be used as probes and primers to identify and isolate the full length sequence of SEQ ID NOS:1-800. The nearest neighbors can indicate a tissue or cell type to be used to construct a library for the full-length sequences of SEQ ID NOS:1-800.

[0344] SEQ ID NOS:1-800 and the translations thereof may be human homologs of known genes of other species or novel allelic variants of known human genes. In such cases, these new human sequences are suitable as diagnostics or therapeutics. As diagnostics, the human sequences SEQ ID NOS:1-800 exhibit greater specificity in detecting and differentiating human cell lines and types than homologs of other species. The human polypeptides encoded by SEQ ID NOS:1-800 are likely to be less immunogenic when administered to humans than homologs from other species. Further, on administration to humans, the polypeptides encoded by SEQ ID NOS:1-800 can show greater specificity or can be better regulated by other human proteins than are homologs from other species.

### Example 3

### Members of Protein Families

[0345] After conducting a profile search as described in the specification above, several of the polynucleotides of the invention were found to encode polypeptides having characteristics of a polypeptide belonging to a known protein families (and thus represent new members of these protein families) and/or comprising a known functional domain (Table 3). Thus the invention encompasses fragments, fusions, and variants of such polynucleotides that retain biological activity associated with the protein family and/or functional domain identified herein.

TABLE 3
Polynucleotides encoding gene products of a protein family or having a known
functional domain(s).

| SEQ ID | | | | |
|---|---|---|---|---|
| NO: | Biological Activity (Profile hit) | Start | Stop | Dir |
| 24 | 4 transmembrane segments integral membrane proteins | 1218 | 578 | rev |
| 41 | 4 transmembrane segments integral membrane proteins | 1086 | 413 | rev |
| 101 | 4 transmembrane segments integral membrane proteins | 1206 | 544 | rev |
| 157 | 4 transmembrane segments integral membrane proteins | 721 | 33 | rev |
| 341 | 4 transmembrane segments integral membrane proteins | 1253 | 613 | rev |
| 395 | 4 transmembrane segments integral membrane proteins | 530 | 10 | for |
| 395 | 4 transmembrane segments integral membrane proteins | 696 | 17 | for |
| 395 | 4 transmembrane segments integral membrane proteins | 471 | 39 | rev |
| 24 | 7 transmembrane receptor (Secretin family) | 1301 | 491 | rev |
| 41 | 7 transmembrane receptor (Secretin family) | 1309 | 10 | rev |
| 101 | 7 transmembrane receptor (Secretin family) | 1330 | 296 | rev |
| 157 | 7 transmembrane receptor (Secretin family) | 1173 | 249 | rev |
| 291 | 7 transmembrane receptor (Secretin family) | 1400 | 269 | rev |
| 291 | 7 transmembrane receptor (Secretin family) | 712 | 130 | for |
| 305 | 7 transmembrane receptor (Secretin family) | 926 | 4 | for |
| 305 | 7 transmembrane receptor (Secretin family) | 753 | 55 | rev |
| 315 | 7 transmembrane receptor (Secretin family) | 1058 | 270 | rev |
| 341 | 7 transmembrane receptor (Secretin family) | 1265 | 534 | rev |
| 116 | Ank repeat | 141 | 218 | for |
| 251 | Ank repeat | 290 | 207 | for |
| 251 | Ank repeat | 467 | 387 | for |
| 63 | ATPases Associated with Various Cellular Activities | 543 | 60 | for |
| 116 | ATPases Associated with Various Cellular Activities | 802 | 313 | for |
| 134 | ATPases Associated with Various Cellular Activities | 525 | 57 | rev |
| 136 | ATPases Associated with Various Cellular Activities | 712 | 163 | for |
| 151 | ATPases Associated with Various Cellular Activities | 719 | 73 | for |
| 151 | ATPases Associated with Various Cellular Activities | 386 | 13 | for |
| 384 | ATPases Associated with Various Cellular Activities | 664 | 140 | for |
| 404 | ATPases Associated with Various Cellular Activities | 704 | 52 | for |
| 374 | Basic region plus leucine zipper transcription factors | 298 | 146 | for |
| 97 | Bromodomain (conserved sequence found in human, | 230 | 63 | for |
| | Drosophila and yeast proteins.) | | | |
| 136 | EF-hand | 121 | 207 | for |
| 242 | EF-hand | 238 | 155 | for |
| 379 | EF-hand | 212 | 126 | for |
| 308 | Eukaryotic aspartyl proteases | 1300 | 461 | rev |
| 213 | GATA family of transcription factors | 720 | 377 | for |
| 367 | G-protein alpha subunit | 971 | 467 | rev |
| 188 | Phorbol esters/diacylglycerol binding | 91 | 177 | for |
| 251 | Phorbol esters/diacylglycerol binding | 133 | 219 | for |
| 202 | protein kinase | 482 | 1 | rev |
| 202 | protein kinase | 970 | 1 | rev |
| 315 | protein kinase | 739 | 158 | for |
| 315 | protein kinase | 1023 | 197 | for |
| 367 | protein kinase | 1046 | 285 | rev |
| 397 | protein kinase | 511 | 6 | for |
| 256 | Protein phosphatase 2C | 13 | 90 | for |
| 256 | Protein phosphatase 2C | 163 | 86 | for |
| 382 | Protein Tyrosine Phosphatase | 261 | 2 | for |
| 306 | SH3 Domain | 141 | 296 | for |
| 386 | SH3 Domain | 359 | 209 | for |
| 169 | Trypsin | 764 | 164 | rev |
| 188 | WD domain, G-beta repeats | 480 | 382 | for |
| 188 | WD domain, G-beta repeats | 206 | 117 | for |
| 335 | WD domain, G-beta repeats | 3 | 92 | for |
| 23 | wnt family of developmental signaling proteins | 1151 | 335 | rev |
| 291 | wnt family of developmental signaling proteins | 779 | 89 | rev |
| 291 | wnt family of developmental signaling proteins | 1347 | 382 | rev |
| 324 | wnt family of developmental signaling proteins | 1180 | 499 | rev |
| 330 | wnt family of developmental signaling proteins | 1180 | 499 | rev |
| 341 | wnt family of developmental signaling proteins | 1399 | 560 | rev |
| 353 | wnt family of developmental signaling proteins | 880 | 49 | rev |
| 188 | WW/rsp5/WWP domain containing proteins | 431 | 354 | for |
| 379 | WW/rsp5/WWP domain containing proteins | 12 | 89 | for |
| 395 | WW/rsp5/WWP domain containing proteins | 153 | 76 | for |
| 395 | WW/rsp5/WWP domain containing proteins | 156 | 64 | for |
| 61 | Zinc finger, C2H2 type | 254 | 192 | for |
| 306 | Zinc finger, C2H2 type | 428 | 367 | for |
| 386 | Zinc finger, C2H2 type | 191 | 253 | for |
| 322 | Zinc finger, CCHC class | 553 | 503 | for |
| 306 | Zinc-binding metalloprotease domain | 101 | 60 | rev |
| 395 | Zinc-binding metalloprotease domain | 28 | 69 | rev |

[0346] Start and stop indicate the position within the individual sequenes that align with the query sequence having the indicated SEQ ID NO. The direction (Dir) indicates the orientation of the query sequence with respect to the individual sequence, where forward (for) indicates that the alignment is in the same direction (left to right) as the sequence provided in the Sequence Listing and reverse (rev) indicates that the alignment is with a sequence complementary to the sequence provided in the Sequence Listing.

[0347] Some polynucleotides exhibited multiple profile hits because, for example, the particular sequence contains overlapping profile regions, and/or the sequence contains two different functional domains. These profile hits are described in more detail below.

[0348] a) Four Transmembrane Integral Membrane Proteins.

[0349] SEQ ID NOS: 24, 41, 101, 157, 341, and 395 correspond to a sequence encoding a polypeptide that is a member of the 4 transmembrane segments integral membrane protein family (transmembrane 4 family). The transmembrane 4 family of proteins includes a number of evolutionarily-related eukaryotic cell surface antigens (Levy et al., J. Biol. Chem., (1991) 266:14597; Tomlinson et al., Eur. J. Immunol. (1993) 23:136; Barclay et al. The leucocyte antigen factbooks. (1993) Academic Press, London/San Diego). The proteins belonging to this family include: 1) Mammalian antigen CD9 (MIC3), which is involved in platelet activation and aggregation; 2) Mammalian leukocyte antigen CD37, expressed on B lymphocytes; 3) Mammalian leukocyte antigen CD53 (OX-44), which is implicated in growth regulation in hematopoietic cells; 4) Mammalian lysosomal membrane protein CD63 (melanoma-associated antigen ME491; antigen AD1); 5) Mammalian antigen CD81 (cell surface protein TAPA-1), which is implicated in regulation of lymphoma cell growth; 6) Mammalian antigen CD82 (protein R2; antigen C33; Kangai 1 (KAI1)), which associates with CD4 or CD8 and delivers costimulatory signals for the TCR/CD3 pathway; 7) Mammalian antigen CD151 (SFA-1; platelet-endothelial tetraspan antigen 3 (PETA-3)); 8) Mammalian cell surface glycoprotein A 15 (TALLA-1; MXS 1); 9) Mammalian novel antigen 2 (NAG-2); 10) Human tumor-associated antigen CO-029; 11) Schistosoma mansoni and japonicum 23 Kd surface antigen (SM23/SJ23).

[0350] The members of the 4 transmembrane family share several characteristics. First, they all are apparently type III membrane proteins, which are integral membrane proteins containing an N-terminal membrane-anchoring domain which is not cleaved during biosynthesis and which functions both as a translocation signal and as a membrane anchor. The family members also contain three additional transmembrane regions, at least seven conserved cysteines residues, and are of approximately the same size (218 to 284 residues). These proteins are collectively know as the “transmembrane 4 superfamily” (TM4) because they span plasma membrane four times. A schematic diagram of the domain structure of these proteins is as follows:

[chemical structure]

[0351] where Cyt is the cytoplasmic domain, TMa is the transmembrane anchor; TM2 to TM4 represents transmembrane regions 2 to 4, ‘C’ are conserved cysteines, and ‘*’ indicates the position of the consensus pattern. The consensus pattern spans a conserved region including two cysteines located in a short cytoplasmic loop between two transmembrane domains: Consensus pattern: G-x(3)-[LIVMF]-x(2)-[GSA]-[LIVMF](2)-G-C-x-[GA]-[STA]-x(2)-[EG]-x(2)-[CWN]-[LIVM](2).

[0352] b) Seven Transmembrane Integral Membrane Proteins.

[0353] SEQ ID NOS: 24, 41, 101, 157, 291, 305, 315, and 341 correspond to a sequence encoding a polypeptide that is a member of the seven transmembrane receptor family. G-protein coupled receptors (Strosberg, Eur. J. Biochem. (1991)196:1; Kerlavage, Curr. Opin. Struct. Biol. (1991) 1:394; and Probst et al., DNA Cell Biol. (1992) 11:1; and Savarese et al., Biochem. J. (1992) 293:1) (also called R7G) are an extensive group of hormones, neurotransmitters, odorants and light receptors which transduce extracellular signals by interaction with guanine nucleotide-binding (G) proteins. The tertiary structure of these receptors is thought to be highly similar. They have seven hydrophobic regions, each of which most probably spans the membrane. The N-terminus is located on the extracellular side of the membrane and is often glycosylated, while the C-terminus is cytoplasmic and generally phosphorylated. Three extracellular loops alternate with three intracellular loops to link the seven transmembrane regions. Most, but not all of these receptors, lack a signal peptide. The most conserved parts of these proteins are the transmembrane regions and the first two cytoplasmic loops. A conserved acidic-Arg-aromatic triplet is present in the N-terminal extremity of the second cytoplasmic loop (Attwood et al., Gene (1991) 98:153) and could be implicated in the interaction with G proteins.

[0354] To detect this widespread family of proteins a pattern is used that contains the conserved triplet and that also spans the major part of the third transmembrane helix. Additional information about the seven transmembrane receptor family, and methods for their identification and use, is found in U.S. Pat. No. 5,759,804. Due in part to their expression on the cell surface and other attractive characteristics, seven transmembrane protein family members are of particular interest as drug targets, as surface antigen markers, and as drug delivery targets (e.g., using antibody-drug complexes and/or use of anti-seven transmembrane protein antibodies as therapeutics in their own right).

[0355] c) Ank Repeats.

[0356] SEQ ID NOS: 116 and 251 represent polynucleotides encoding Ank repeat-containing proteins. The ankyrin motif is a 33 amino acid sequence named after the protein ankyrin which has 24 tandem 33-amino-acid motifs. Ank repeats were originally identified in the cell-cycle-control protein cdc10 (Breeden et al., Nature (1987) 329:651). Proteins containing ankyrin repeats include ankyrin, myotropin, 1-kappaB proteins, cell cycle protein cdc10, the Notch receptor (Matsuno et al., Development (1997) 124(21):4265); G9a (or BAT8) of the class III region of the major histocompatibility complex (Biochem J. 290:811-818, 1993), FABP, GABP, 53BP2, Lin12, glp-1, SW14, and SW16. The functions of the ankyrin repeats are compatible with a role in protein-protein interactions (Bork, Proteins (1993) 17(4):363; Lambert and Bennet, Eur. J. Biochem. (1993) 211:1; Kerr et al., Current Op. Cell Biol. (1992) 4:496; Bennet et al., J. Biol. Chem. (1980) 255:6424).

[0357] The 90 kD N-terminal domain of ankyrin contains a series of 24 33-amino-acid ank repeats. (Lux et al., Nature (1990) 344:36-42, Lambert et al., PNAS USA (1990) 87:1730.) The 24 ank repeats form four folded subdomains of 6 repeats each. These four repeat subdomains mediate interactions with at least 7 different families of membrane proteins. Ankyrin contains two separate binding sites for anion exchanger dimers. One site utilizes repeat subdomain two (repeats 7-12) and the other requires both repeat subdomains 3 and 4 (repeats 13-24). Since the anion exchangers exist in dimers, ankyrin binds 4 anion exchangers at the same time. (Michaely and Bennett, J. Biol. Chem. (1995) 270(37):22050) The repeat motifs are involved in ankyrin interaction with tubulin, spectrin, and other membrane proteins. (Lux et al., Nature (1990) 344:36.)

[0358] The Rel/NF-kappaB/Dorsal family of transcription factors have activity that is controlled by sequestration in the cytoplasm in association with inhibitory proteins referred to as I-kappaB. (Gilmore, Cell (1990) 62:841; Nolan and Baltimore, Curr Opin Genet Dev. (1992) 2:211; Baeuerle, Biochim Biophys Acta (1991) 1072:63; Schmitz et al., Trends Cell Biol. (1991) 1:130.) I-kappaB proteins contain 5 to 8 copies of 33 amino acid ankyrin repeats and certain NF-kappaB/rel proteins are also regulated by cis-acting ankyrin repeat containing domains including p105NF-kappaB which contains a series of ankyrin repeats (Diehl and Hannink, J. Virol. (1993) 67(12):7161). The I-kappaBs and Cactus (also containing ankyrin repeats) inhibit activators through differential interactions with the Rel-homology domain. The gene family includes proto-oncogenes, thus broadly implicating I-kappaB in the control of both normal gene expression and the aberrant gene expression that makes cells cancerous. (Nolan and Baltimore, Curr Opin Genet Dev. (1992) 2(2):211-220). In the case of rel/NF-kappaB and pp40/I-kappaBβ, both the ankyrin repeats and the carboxy-terminal domain are required for inhibiting DNA-binding activity and direct association of pp40/I-kappaBβ with rel/NF-kappaB protein. The ankyrin repeats and the carboxy-terminal of pp40/I-kappaBβ (form a structure that associates with the rel homology domain to inhibit DNA binding activity (Inoue et al., PNAS USA (1992) 89:4333).

[0359] The 4 ankyrin repeats in the amino terminus of the transcription factor subunit GABPβ are required for its interaction with the GABPα subunit to form a functional high affinity DNA-binding protein. These repeats can be crosslinked to DNA when GABP is bound to its target sequence. (Thompson et al., Science (1991) 253:762; LaMarco et al., Science (1991) 253:789).

[0360] Myotrophin, a 12.5 kDa protein having a key role in the initiation of cardiac hypertrophy, comprises ankyrin repeats. The ankyrin repeats are characteristic of a hairpin-like protruding tip followed by a helix-turn-helix motif. The V-shaped helix-turn-helix of the repeats stack sequentially in bundles and are stabilized by compact hydrophobic cores, whereas the protruding tips are less ordered.

[0361] d) ATPases Associated with Various Cellular Activities (AAA).

[0362] SEQ ID NOS: 63, 116, 134, 136, 151, 384, and 404 polynucleotides encoding novel members of the “ATPases Associated with diverse cellular Activities” (AAA) protein family The AAA protein family is composed of a large number of ATPases that share a conserved region of about 220 amino acids that contains an ATP-binding site (Froehlich et al., J. Cell Biol. (1991) 114:443; Erdmann et al. Cell (1991) 64:499; Peters et al., EMBO J. (1990) 9:1757; Kunau et al., Biochimie (1993) 75:209-224; Confalonieri et al., BioEssays (1995) 17:639; http://yeamob.pci.chemie.uni-tuebingen.de/AAA/Description.html). The proteins that belong to this family either contain one or two AAA domains.

[0363] Proteins containing two AAA domains include: 1) Mammalian and drosophila NSF (N-ethylmaleimide-sensitive fusion protein) and the fungal homolog, SEC18, which are involved in intracellular transport between the endoplasmic reticulum and Golgi, as well as between different Golgi cisternae; 2) Mammalian transitional endoplasmic reticulum ATPase (previously known as p97 or VCP), which is involved in the transfer of membranes from the endoplasmic reticulum to the golgi apparatus. This ATPase forms a ring-shaped homooligomer composed of six subunits. The yeast homolog, CDC48, plays a role in spindle pole proliferation; 3) Yeast protein PAS1 essential for peroxisome assembly and the related protein PAS1 from Pichia pastoris; 4) Yeast protein AFG2; 5) Sulfolobus acidocaldarius protein SAV and Halobacterium salinarium cdcH, which may be part of a transduction pathway connecting light to cell division.

[0364] Proteins containing a single AAA domain include: 1) Escherichia coli and other bacteria ftsH (or hflB) protein. FtsH is an ATP-dependent zinc metallopeptidase that degrades the heat-shock sigma-32 factor, and is an integral membrane protein with a large cytoplasmic C-terminal domain that contain both the AAA and the protease domains; 2) Yeast protein YME1, a protein important for maintaining the integrity of the mitochondrial compartment. YME1 is also a zinc-dependent protease; 3) Yeast protein AFG3 (or YTA10). This protein also contains an AAA domain followed by a zinc-dependent protease domain; 4) Subunits from regulatory complex of the 26S proteasome (Hilt et al., Trends Biochem. Sci. (1996) 21:96), which is involved in the ATP-dependent degradation of ubiquitinated proteins, which subunits include: a) Mammalian 4 and homologs in other higher eukaryotes, in yeast (gene YTA5) and fission yeast (gene mts2); b) Mammalian 6 (TBP7) and homologs in other higher eukaryotes and in yeast (gene YTA2); c) Mammalian subunit 7 (MSS1) and homologs in other higher eukaryotes and in yeast (gene CIM5 or YTA3); d) Mammalian subunit 8 (P45) and homologs in other higher eukaryotes and in yeast (SUG1or CIM3 or TBYI) and fission yeast (gene let1); e) Other probable subunits include human TBP1, which influences HIV gene expression by interacting with the virus tat transactivator protein, and yeast YTA1 and YTA6; 5) Yeast protein BCS1, a mitochondrial protein essential for the expression of the Rieske iron-sulfur protein; 6) Yeast protein MSP1, a protein involved in intramitochondrial sorting of proteins; 7) Yeast protein PAS8, and the corresponding proteins PAS5 from Pichia pastoris and PAY4 from Yarrowia lipolytica; 8) Mouse protein SKD1 and its fission yeast homolog (SpAC2G11.06); 9) Caenorhabditis elegans meiotic spindle formation protein mei-1; 10) Yeast protein SAP1′ 11) Yeast protein YTA7; and 12) Mycobacterium leprae hypothetical protein A2126A.

[0365] In general, the AAA domains in these proteins act as ATP-dependent protein clamps(Confalonieri et al. (1995) BioEssays 17:639). In addition to the ATP-binding ‘A’ and ‘B’ motifs, which are located in the N-terminal half of this domain, there is a highly conserved region located in the central part of the domain which was used in the development of the signature pattern. The consensus pattern is: [LIVMT]-x-[LIVMT]-[LIVMF]-x-[GATMC]-[ST]-[NS]-x(4)-[LIVM]-D-x-A-[LIFA]-x-R.

[0366] e) Basic Region Plus Leucine Zipper Transcription Factors.

[0367] SEQ ID NO:374 correspond to a polynucleotide encoding a novel member of the family of basic region plus leucine zipper transcription factors. The bZIP superfamily (Hurst, Protein Prof. (1995) 2:105; and Ellenberger, Curr. Opin. Struct. Biol. (1994) 4:12) of eukaryotic DNA-binding transcription factors encompasses proteins that contain a basic region mediating sequence-specific DNA-binding followed by a leucine zipper required for dimerization. Members of the family include transcription factor AP-1, which binds selectively to enhancer elements in the cis control regions of SV40 and metallothionein IIA. AP-1, also known as c-jun, is the cellular homolog of the avian sarcoma virus 17 (ASV 17) oncogene v-jun.

[0368] Other members of this protein family include jun-B and jun-D, probable transcription factors that are highly similar to jun/AP-1; the fos protein, a proto-oncogene that forms a non-covalent dimer with c-jun; the fos-related proteins fra-1, and fos B; and mammalian cAMP response element (CRE) binding proteins CREB, CREM, ATF-1, ATF-3, ATF-4, ATF-5, ATF-6 and LRF-1. The consensus pattern for this protein family is: [KR]-x(1,3)-[RKSAQ]-N-x(2)-[SAQ](2)-x-[RKTAENQ]-x-R-x-[RK].

[0369] f) Bromodomain.

[0370] SEQ ID NO:97 corresponds to a polynucleotide encoding a polypeptide having a bromodomain region (Haynes et al., 1992, Nucleic Acids Res. 20:2693-2603, Tamnkun et al., 1992, Cell 68:561-572, and Tamkun, 1995, Curr. Opin. Genet. Dev. 5:473-477), which is a conserved region of about 70 amino acids found in the following proteins: 1) Higher eukaryotes transcription initiation factor TFIID 250 Kd subunit (TBP-associated factor p250) (gene CCG1); P250 is associated with the TFIID TATA-box binding protein and seems essential for progression of the GI phase of the cell cycle. 2) Human RING3, a protein of unknown function encoded in the MHC class II locus; 3) Mammalian CREB-binding protein (CBP), which mediates cAMP-gene regulation by binding specifically to phosphorylated CREB protein; 4) Mammalian homologs of brahma, including three brahma-like human: SNF2a(hBRM), SNF2b, and BRG1; 5) Human BS69, a protein that binds to adenovirus E1A and inhibits E1A transactivation; 6) Human peregrin (or Br140).

[0371] The bromodomain is thought to be involved in protein-protein interactions and may be important for the assembly or activity of multicomponent complexes involved in transcriptional activation. The consensus pattern, which spans a major part of the bromodomain, is: [STANVF]-x(2)-F-x(4)-[DNS]-x(5,7)-[DENQTF]-Y-[HFY]-x(2)-[LIVMFY]-x(3)-[LIVM]-x(4)-[LIVM]-x(6,8)-Y-x(12,13)-[LIVM]-x(2)-N-[SACF]-x(2)-[FY].

[0372] g) EF-Hand.

[0373] SEQ ID NOS:136, 242, and 379 correspond to polynucleotides encoding a novel protein in the family of EF-hand proteins. Many calcium-binding proteins belong to the same evolutionary family and share a type of calcium-binding domain known as the EF-hand (Kawasaki et al., Protein. Prof. (1995) 2:305-490). This type of domain consists of a twelve residue loop flanked on both sides by a twelve residue alpha-helical domain. In an EF-hand loop the calcium ion is coordinated in a pentagonal bipyramidal configuration. The six residues involved in the binding are in positions 1, 3, 5, 7, 9 and 12; these residues are denoted by X, Y, Z, -Y, -X and -Z. The invariant Glu or Asp at position 12 provides two oxygens for liganding Ca (bidentate ligand).

[0374] Proteins known to contain EF-hand regions include: Calmodulin (Ca=4, except in yeast where Ca=3) (“Ca=” indicates approximate number of EF-hand regions); diacylglycerol kinase (EC 2.7.1.107) (DGK) (Ca=2); 2) FAD-dependent glycerol-3-phosphate dehydrogenase (EC 1.1.99.5) from mammals (Ca=1); guanylate cyclase activating protein (GCAP) (Ca=3); MIF related proteins 8 (MRP-8 or CFAG) and 14 (MRP-14) (Ca=2); myosin regulatory light chains (Ca=1); oncomodulin (Ca=2); osteonectin (basement membrane protein BM-40) (SPARC); and proteins that contain an “osteonectin” domain (QR1, matrix glycoprotein SC1).

[0375] The consensus pattern includes the complete EF-hand loop as well as the first residue which follows the loop and which seem to always be hydrophobic.

[0376] Consensus pattern: D-x-[DNS]-{ILVFYW}-[DENSTG]-[DNQGHRK]-{GP}-[LIVMC]-[DENQSTAGC]-x(2)-[DE]-[LIVMFYW]

[0377] h) Eukaryotic Aspartyl Proteases.

[0378] SEQ ID NO:308 corresponds to a gene encoding a novel eukaryotic aspartyl protease. Aspartyl proteases, known as acid proteases, (EC 3.4.23.-) are a widely distributed family of proteolytic enzymes (Foltmann B., Essays Biochem. (1981) 17:52; Davies D. R., Annu. Rev. Biophys. Chem. (1990) 19:189; Rao J. K. M., et al., Biochemistry (1991) 30:4663) known to exist in vertebrates, fungi, plants, retroviruses and some plant viruses. Aspartate proteases of eukaryotes are monomeric enzymes which consist of two domains. Each domain contains an active site centered on a catalytic aspartyl residue. The two domains most probably evolved from the duplication of an ancestral gene encoding a primordial domain. Currently known eukaryotic aspartyl proteases include: 1) Vertebrate gastric pepsins A and C (also known as gastricsin); 2) Vertebrate chymosin (rennin), involved in digestion and used for making cheese; 3) Vertebrate lysosomal cathepsins D (EC 3.4.23.5) and E (EC 3.4.23.34); 4) Mammalian renin (EC 3.4.23.15) whose function is to generate angiotensin I from angiotensinogen in the plasma; 5) Fungal proteases such as aspergillopepsin A (EC 3.4.23.18), candidapepsin (EC 3.4.23.24), mucoropepsin (EC 3.4.23.23) (mucor rennin), endothiapepsin (EC 3.4.23.22), polyporopepsin (EC 3.4.23.29), and rhizopuspepsin (EC 3.4.23.21); and 6) Yeast saccharopepsin (EC 3.4.23.25) (proteinase A) (gene PEP4). PEP4 is implicated in posttranslational regulation of vacuolar hydrolases; 7) Yeast barrierpepsin (EC 3.4.23.35) (gene BAR 1); a protease that cleaves alpha-factor and thus acts as an antagonist of the mating pheromone; and 8) Fission yeast sxal which is involved in degrading or processing the mating pheromones.

[0379] Most retroviruses and some plant viruses, such as badnaviruses, encode for an aspartyl protease which is an homodimer of a chain of about 95 to 125 amino acids. In most retroviruses, the protease is encoded as a segment of a polyprotein which is cleaved during the maturation process of the virus. It is generally part of the pol polyprotein and, more rarely, of the gag polyprotein. Because the sequence around the two aspartates of eukaryotic aspartyl proteases and around the single active site of the viral proteases is conserved, a single signature pattern can be used to identify members of both groups of proteases. The consensus pattern is: [LIVMFGAC]-[LIVMTADN]-[LIVFSA]-D-[ST]-G-[STAV]-[STAPDENQ]-x-[LIVMFSTNC]-x-[LIVMFGTA], where D is the active site residue.

[0380] i) GATA Family of Transcription Factors.

[0381] SEQ ID NO:213 corresponds to a novel member of the GATA family of transcription factors. The GATA family of transcription factors are proteins that bind to DNA sites with the consensus sequence (A/T)GATA(A/G), found within the regulatory region of a number of genes. Proteins currently known to belong to this family are: 1) GATA-1 (Trainor, C. D., et al., Nature (1990) 343:92) (also known as Eryf1, GF-1 or NF-E1), which binds to the GATA region of globin genes and other genes expressed in erythroid cells. It is a transcriptional activator which probably serves as a general ‘switch’ factor for erythroid development; 2) GATA-2 (Lee, M. E., et al., J. Biol. Chem. (1991) 266:16188), a transcriptional activator which regulates endothelin-1 gene expression in endothelial cells; 3) GATA-3 (Ho, I. -C., et al., EMBO J. (1991) 10:1187), a transcriptional activator which binds to the enhancer of the T-cell receptor alpha and delta genes; 4) GATA-4 (Spieth, J., et al., Mol. Cell. Biol. (1991) 11:4651), a transcriptional activator expressed in endodermally derived tissues and heart; 5) Drosophila protein pannier (or DGATAa) (gene pnr) which acts as a repressor of the achaete-scute complex (as-c); 6) Bombyx mori BCFI (Drevet, J. R., et al., J Biol. Chem. (1994) 269:10660), which regulates the expression of chorion genes; 7) Caenorhabditis elegans elt-1 and elt-2, transcriptional activators of genes containing the GATA region, including vitellogenin genes (Hawkins, M. G., et al., J. Biol. Chem. (1995) 270:14666); 8) Ustilago maydis urbs1 (Voisard, C. P. O., et al., Mol. Cell. Biol. (1993) 13:7091), a protein involved in the repression of the biosynthesis of siderophores; 9) Fission yeast protein GAF2.

[0382] All these transcription factors contain a pair of highly similar ‘zinc finger’ type domains with the consensus sequence C-x2-C-x17-C-x2-C. Some other proteins contain a single zinc finger motif highly related to those of the GATA transcription factors. These proteins are: 1) Drosophila box A-binding factor (ABF) (also known as protein serpent (gene srp)) which may function as a transcriptional activator protein and may play a key role in the organogenesis of the fat body; 2) Emericella nidulans are (Arst, H. N., Jr., et al., Trends Genet. (1989) 5:291) a transcriptional activator which mediates nitrogen metabolite repression; 3) Neurospora crassa nit-2 (Fu, Y. -H., et al., Mol. Cell. Biol. (1990) 10:1056), a transcriptional activator which turns on the expression of genes coding for enzymes required for the use of a variety of secondary nitrogen sources, during conditions of nitrogen limitation; 4) Neurospora crassa white collar proteins 1 and 2 (WC-1 and WC-2), which control expression of light-regulated genes; 5) Saccharomyces cerevisiae DAL81 (or UGA43), a negative nitrogen regulatory protein; 6) Saccharomyces cerevisiae GLN3, a positive nitrogen regulatory protein; 7) Saccharomyces cerevisiae GAT1; 8) Saccharomyces cerevisiae GZF3.

[0383] The consensus pattern for the GATA family is: C-x-[DN]-C-x(4,5)-[ST]-x(2)-W-[HR]-[RK]-x(3)-[GN]-x(3,4)-C-N-[AS]-C, where the four C's are zinc ligands.

[0384] j) G-Protein Alpha Subunit.

[0385] SEQ ID NO:367 corresponds to a gene encoding a novel polypeptide of the G-protein alpha subunit family. Guanine nucleotide binding proteins (G-proteins) are a family of membrane-associated proteins that couple extracellularly-activated integral-membrane receptors to intracellular effectors, such as ion channels and enzymes that vary the concentration of second messenger molecules. G-proteins are composed of 3 subunits (alpha, beta and gamma) which, in the resting state, associate as a trimer at the inner face of the plasma membrane. The alpha subunit has a molecule of guanosine diphosphate (GDP) bound to it. Stimulation of the G-protein by an activated receptor leads to its exchange for GTP (guanosine triphosphate). This results in the separation of the alpha from the beta and gamma subunits, which always remain tightly associated as a dimer. Both the alpha and beta-gamma subunits are then able to interact with effectors, either individually or in a cooperative manner. The intrinsic GTPase activity of the alpha subunit hydrolyses the bound GTP to GDP. This returns the alpha subunit to its inactive conformation and allows it to reassociate with the beta-gamma subunit, thus restoring the system to its resting state.

[0386] G-protein alpha subunits are 350-400 amino acids in length and have molecular weights in the range 40-45 kDa. Seventeen distinct types of alpha subunit have been identified in mammals. These fall into 4 main groups on the basis of both sequence similarity and function: alpha-s, alpha-q, alpha-i and alpha-12 (Simon et al., Science (1993) 252:802). Many alpha subunits are substrates for ADP-ribosylation by cholera or pertussis toxins. They are often N-terminally acylated, usually with myristate and/or palmitoylate, and these fatty acid modifications are probably important for membrane association and high-affinity interactions with other proteins. The atomic structure of the alpha subunit of the G-protein involved in mammalian vision, transducin, has been elucidated in both GTP- and GDB-bound forms, and shows considerable similarity in both primary and tertiary structure in the nucleotide-binding regions to other guanine nucleotide binding proteins, such as p21-ras and EF-Tu.

[0387] k) Phorbol Esters/Diacylglycerol Binding.

[0388] SEQ ID NO:188 and 251 represent polynucleotides encoding a protein belonging to the family including phorbol esters/diacylglycerol binding proteins. Diacylglycerol (DAG) is an important second messenger. Phorbol esters (PE) are analogues of DAG and potent tumor promoters that cause a variety of physiological changes when administered to both cells and tissues. DAG activates a family of serine/threonine protein kinases, collectively known as protein kinase C (PKC) (Azzi et al., Eur. J. Biochem. (1992) 208:547). Phorbol esters can directly stimulate PKC. The N-terminal region of PKC, known as C1, has been shown (Ono et al., Proc. Natl. Acad. Sci. USA (1989) 86:4868) to bind PE and DAG in a phospholipid and zinc-dependent fashion. The C1 region contains one or two copies (depending on the isozyme of PKC) of a cysteine-rich domain about 50 amino-acid residues long and essential for DAG/PE-binding. Such a domain has also been found in, for example, the following proteins.

[0389] (1) Diacylglycerol kinase (EC 2.7.1.107) (DGK) (Sakane et al., Nature (1990) 344:345), the enzyme that converts DAG into phosphatidate. It contains two copies of the DAG/PE-binding domain in its N-terminal section. At least five different forms of DGK are known in mammals; and

[0390] (2) N-chimaerin, a brain specific protein which shows sequence similarities with the BCR protein at its C-terminal part and contains a single copy of the DAG/PE-binding domain at its N-terminal part. It has been shown (Ahmed et al., Biochem. J. (1 990) 2 72:767, and Ahmed et al., Biochem. J. (1 991) 280:23 3) to be able to bind phorbol esters.

[0391] The DAG/PE-binding domain binds two zinc ions; the ligands of these metal ions are probably the six cysteines and two histidines that are conserved in this domain. The signature pattern completely spans the DAG/PE domain. The consensus pattern is: H-x-[LIVMFYW]-x(8, 11)-C-x(2)-C-x(3)-[LIVMFC]-x(5,10)-C-x(2)-C-x(4)-[HD]-x(2)-C-x(5,9)-C. All the C and H are probably involved in binding zinc.

[0392] 1) Protein Kinase.

[0393] SEQ ID NOS:202, 315, 367, and 397 represent polynucleotides encoding protein kinases. Protein kinases catalyze phosphorylation of proteins in a variety of pathways, and are implicated in cancer. Eukaryotic protein kinases (Hanks S. K., et al., FASEB J. (1995) 9:576; Hunter T., Meth. Enzymol.(1991)200:3; Hanks S. K., et al., Meth. Enzymol. (1991) 200:38; Hanks S. K., Curr. Opin. Struct. Biol. (1991) 1:369; Hanks S. K., et al., Science (1988) 241:42) are enzymes that belong to a very extensive family of proteins which share a conserved catalytic core commnon to both serine/threonine and tyrosine protein kinases. There are a number of conserved regions in the catalytic domain of protein kinases. Two of the conserved regions are the basis for the signature pattern in the protein kinase profile. The first region, which is located in the N-terminal extremity of the catalytic domain, is a glycine-rich stretch of residues in the vicinity of a lysine residue, which has been shown to be involved in ATP binding. The second region, which is located in the central part of the catalytic domain, contains a conserved aspartic acid residue which is important for the catalytic activity of the enzyme (Knighton D. R., et al., Science (1991) 253:407). The protein kinase profile includes two signature patterns for this second region: one specific for serine/threonine kinases and the other for tyro sine kinases. A third profile is based on the alignment in (Hanks S. K., et al., FASEB J. (1995) 9:576) and covers the entire catalytic domain. The consensus patterns are as follows:

[0394] 1) Consensus pattern: [LIV]-G-{P}-G-{P}-[FYWMGSTNH]-[SGA]-{PW}-[LIVCAT]-{PDI}-x-[GSTACLIVMFY]-x(5,18)-[LIVMFYWCSTAR]-[AIVP]-[LIVMFAGCKR]-K, where K binds ATP. The majority of known protein ki-nases are detected by this pattern. Proteins kinases that are not detected by this consensus include viral kinases, which are quite divergent in this region and are completely missed by this pattern.

[0395] 2) Consensus pattern: [LIVMFYC]-x-[HY]-x-D-[LIVMFY]-K-x(2)-N-[LIVMFYCT](3), where D is an active site residue. This consensus sequence identifies most serine/threonine-specific protein kinases with only 10 exceptions. Half of the exceptions are viral kinases, while the other exceptions include Epstein-Barr virus BGLF4 and Drosophila ninaC, which have Ser and Arg, respectively, instead of the conserved Lys. These latter two protein kinases are detected by the tyrosine kinase specific pattern described below.

[0396] 3) Consensus pattern: [LIVMFYC]-x-[HY]-x-D-[LIVMFY]-[RSTAC]-x(2)-N-[LIVMFYC], where D is an active site residue. All tyrosine-specific protein kinases are detected by this consensus pattern, with the exception of human ERBB3 and mouse blk. This pattern also detects most bacterial aminoglycoside phosphotransferases (Benner S., Nature (1987) 329:21; Kirby R., J. Mol. Evol. (1992) 30:489) and herpesviruses ganciclovir kinases (Littler E., et al., Nature (1992) 358:160), which are structurally and evolutionary related to protein kinases.

[0397] The protein kinase profile also detects receptor guanylate cyclases and 2-5A-dependent ribonucleases. Sequence similarities between these two families and the eukaryotic protein kinase family have been noticed previously. The profile also detects Arabidopsis thaliana kinase-like protein TMKL1 which seems to have lost its catalytic activity.

[0398] If a protein analyzed includes the two of the above protein kinase signatures, the probability of it being a protein kinase is close to 100%. Eukaryotic-type protein kinases have also been found in prokaryotes such as Myxococcus xanthus (Munoz-Dorado J., et al., Cell (1991) 67:995) and Yersinia pseudotuberculosis. The patterns shown above has been updated since their publication in (Bairoch A., et al., Nature (1988) 331:22).

[0399] m) Protein Phosphatase 2C, SEQ ID NO:256 corresponds to a polynucleotide encoding a novel protein phosphatase 2C (PP2C), which is one of the four major classes of mammalian serine/threonine specific protein phosphatases. PP2C (Wenk et al., FEBS Lett. (1992) 297:135) is a monomeric enzyme of about 42 Kd which shows broad substrate specificity and is dependent on divalent cations (mainly manganese and magnesium) for its activity. Three isozymes are currently known in mammals: PP2C-alpha, -beta and -gamma.

[0400] n) Protein Tyrosine Phosphatase.

[0401] SEQ ID NO:382 represents a polynucleotide encoding a protein tyrosine kinase. Tyrosine specific protein phosphatases (EC 3.1.3.48) (PTPase) (Fischer et al., Science (1991) 253:401; Charbonneau et al., Annu. Rev. Cell Biol. (1992) 8:463; Trowbridge, J. Biol Chem. (1991) 266:23517; Tonks et al., Trends Biochem. Sci. (1989) 14:497; and Hunter, Cell (1989) 58:1013) catalyze the removal of a phosphate group attached to a tyrosine residue. These enzymes are very important in the control of cell growth, proliferation, differentiation and transformation. Multiple forms of PTPase have been characterized and can be classified into two categories: soluble PTPases and transmembrane receptor proteins that contain PTPase domain(s).

[0402] Soluble PTPases include PTPN3 (H1) and PTPN4 (MEG), enzymes that contain an N-terminal band 4.1-like domain and could act at junctions between the membrane and cytoskeleton; PTPN6 (PTP-1C; HCP; SHP) and PTPN11(PTP-2C; SH-PTP3; Syp), enzymes that contain two copies of the SH2 domain at its N-terminal extremity.

[0403] Dual specificity PTPases include DUSP1 (PTPN10; MAP kinase phosphatase-1; MKP-1) which dephosphorylates MAP kinase on both Thr-183 and Tyr-185; and DUSP2 (PAC-1), a nuclear enzyme that dephosphorylates MAP kinases ERK1 and ERK2 on both Thr and Tyr residues.

[0404] Structurally, all known receptor PTPases are made up of a variable length extracellular domain, followed by a transmembrane region and a C-terminal catalytic cytoplasmic domain. Some of the receptor PTPases contain fibronectin type III (FN-III) repeats, immunoglobulin-like domains, MAM domains or carbonic anhydrase-like domains in their extracellular region. The cytoplasmic region generally contains two copies of the PTPAse domain. The first seems to have enzymatic activity, while the second is inactive but seems to affect substrate specificity of the first. In these domains, the catalytic cysteine is generally conserved but some other, presumably important, residues are not.

[0405] PTPase domains consist of about 300 amino acids. There are two conserved cysteines and the second one has been shown to be absolutely required for activity. Furthermore, a number of conserved residues in its immediate vicinity have also been shown to be important. The consensus pattern for PTPases is: [LIVMF]-H-C-x(2)-G-x(3)-[STC]-[STAGP]-x-[LIVMFY]; C is the active site residue.

[0406] o) SH3 Domain.

[0407] SEQ ID NO:306 and 386 represent polynucleotides encoding SH3 domain proteins. The Src homology 3 (SH3) domain is a small protein domain of about 60 amino acid residues first identified as a conserved sequence in the non-catalytic part of several cytoplasmic protein tyrosine kinases (e.g. Src, Abl, Lck) (Mayer et al., Nature (1988) 332:272). The domain has also been found in a variety of intracellular or membrane-associated proteins (Musacchio et al., FEBS Lett. (1992) 307:55; Pawson et al., Curr. Biol. (1993) 3:434; Mayer et al., Trends Cell Biol. (1993) 3:8; and Pawson et al., Nature (1995) 373:573).

[0408] The SH3 domain has a characteristic fold that consists of five or six beta-strands arranged as two tightly packed anti-parallel beta sheets. The linker regions may contain short helices (Kuriyan et al., Curr. Opin. Struct. Biol. (1993) 3:828). It is believed that SH3 domain-containing proteins mediate assembly of specific protein complexes via binding to proline-rich peptides (Morton et al., Curr. Biol. (1994) 4:615). In general, SH3 domains are found as single copies in a given protein, but there is a significant number of proteins with two SH3 domains and a few with 3 or 4 copies.

[0409] SH3 domains have been identified in, for example, protein tyrosine kinases, such as the Src, Abl, Bkt, Csk and ZAP70 families of kinases; mammalian phosphatidylinositol-specific phospholipase C-gamma-1 and -2; mammalian phosphatidyl inositol 3-kinase regulatory p85 subunit; mammalian Ras GTPase-activating protein (GAP); mammalian Vav oncoprotein, a guanine nucleotide exchange factor of the CDC24 family; Drosophila lethal(1)discs large-1 tumor suppressor protein (gene Dlg1); mammalian tight junction protein ZO-1; vertebrate erythrocyte membrane protein p55; Caenorhabditis elegans protein lin-2; rat protein CASK; and mammalian synaptic proteins SAP90/PSD-95, CHAPSYN-110/PSD-93, SAP97/DLG1 and SAP102. Novel SH3-domain containing polypeptides will facilitate elucidation of the role of such proteins in important biological pathways, such as ras activation.

[0410] p) Trypsin.

[0411] SEQ ID NO:169 corresponds to a novel serine protease of the trypsin family. The catalytic activity of the serine proteases from the trypsin family is provided by a charge relay system involving an aspartic acid residue hydrogen-bonded to a histidine, which itself is hydrogen-bonded to a serine. The sequences in the vicinity of the active site serine and histidine residues are well conserved in this family of proteases (Brenner S., Nature (1988) 334:528). Proteases known to belong to the trypsin family include: 1) Acrosin; 2) Blood coagulation factors VII, IX, X, XI and XII, thrombin, plasminogen, and protein C; 3) Cathepsin G; 4) Chymotrypsins; 5) Complement components C1r, C1s, C2, and complement factors B, D and I; 6) Complement-activating component of RA-reactive factor; 7) Cytotoxic cell proteases (granzymes A to H); 8) Duodenase I; 9) Elastases 1, 2, 3A, 3B (protease E), leukocyte (medullasin).; 10) Enterokinase (EC 3.4.21.9) (enteropeptidase); 11) Hepatocyte growth factor activator; 12) Hepsin; 13) Glandular (tissue) kallikreins (including EGF-binding protein types A, B, and C, NGF-gamma chain, gamma-renin, prostate specific antigen (PSA) and tonin); 14) Plasma kallikrein; 15) Mast cell proteases (MCP) 1 (chymase) to 8; 16) Myeloblastin (proteinase 3) (Wegener's autoantigen); 17) Plasminogen activators (urokinase-type, and tissue-type); 18) Trypsins I, II, III, and IV; 19) Tryptases; 20) Snake venom proteases such as ancrod, batroxobin, cerastobin, flavoxobin, and protein C activator; 21) Collagenase from common cattle grub and collagenolytic protease from Atlantic sand fiddler crab; 22) Apolipoprotein(a); 23) Blood fluke cercarial protease; 24) Drosophila trypsin like proteases: alpha, easter, snake-locus; 25) Drosophila protease stubble (gene sb); and 26) Major mite fecal allergen Der p III. All the above proteins belong to family S1 in the classification of peptidases (Rawlings N. D., et al., Meth. Enzymol. (1994) 244:19; http://www.expasy.ch/cgi-bin/lists?peptidas.txt) and originate from eukaryotic species. It should be noted that bacterial proteases that belong to family S2A are similar enough in the regions of the active site residues that they can be picked up by the same patterns.

[0412] The consensus patterns for this trypsin protein family are: 1) [LIVM]-[ST]-A-[STAG]-H-C, where H is the active site residue. All sequences known to belong to this class detected by the pattern, except for complement components C1r and C1s, pig plasminogen, bovine protein C, rodent urokinase, ancrod, gyroxin and two insect trypsins; 2) [DNSTAGC]-[GSTAPIMVQH]-x(2)-G-[DE]-S-G-[GS]-[SAPHV]-[LIVMFYWH]-[LIVMFYSTANQH], where S is the active site residue. All sequences known to belong to this family are detected by the above consensus sequences, except for 18 different proteases which have lost the first conserved glycine. If a protein includes both the serine and the histidine active site signatures, the probability of it being a trypsin family serine protease is 100%.

[0413] q) WD Domain, G-Beta Repeats.

[0414] SEQ ID NOS:188 and 335 represent novel members of the WD domain/G-beta repeat family. Beta-transducin (G-beta) is one of the three subunits (alpha, beta, and gamma) of the guanine nucleotide-binding proteins (G proteins) which act as intermediaries in the transduction of signals generated by transmembrane receptors (Gilman, Annu. Rev. Biochem. (1987) 56:615). The alpha subunit binds to and hydrolyzes GTP; the functions of the beta and gamma subunits are less clear but they seem to be required for the replacement of GDP by GTP as well as for membrane anchoring and receptor recognition.

[0415] In higher eukaryotes, G-beta exists as a small multigene family of highly conserved proteins of about 340 amino acid residues. Structurally, G-beta consists of eight tandem repeats of about 40 residues, each containing a central Trp-Asp motif (this type of repeat is sometimes called a WD-40 repeat). Such a repetitive segment has been shown to exist in a number of other proteins including: human LIS1, a neuronal protein involved in type-1 lissencephaly; and mammalian coatomer beta′ subunit (beta′-COP), a component of a cytosolic protein complex that reversibly associates with Golgi membranes to form vesicles that mediate biosynthetic protein transport.

[0416] The consensus pattern for the WD domain/G-Beta repeat family is: [LIVMSTAC]-[LIVMFYWSTAGC]-[LIMSTAG]-[LIVMSTAGC]-x(2)-[DN]-x(2)-[LIVMWSTAC]-x-[LIVMFSTAG]-W-[DEN]-[LIVMFSTAGCN].

[0417] r) wnt Family of Developmental Signaling Proteins.

[0418] SEQ ID NO: 23, 291, 324, 330, 341, and 353 correspond to novel members of the wnt family of developmental signaling proteins. Wnt-1 (previously known as int-1), the seminal member of this family, (Nusse R., Trends Genet. (1988) 4:291) is a proto-oncogene induced by the integration of the mouse mammary tumor virus. It is thought to play a role in intercellular communication and seems to be a signalling molecule important in the development of the central nervous system (CNS). The sequence of wnt-1 is highly conserved in mammals, fish, and amphibians. Wnt-1 was found to be a member of a large family of related proteins (Nusse R., et al., Cell (1992) 69:1073; McMahon A. P., Trends Genet. (1992) 8:1; Moon R. T., BioEssays (1993) 15:91) that are all thought to be developmental regulators. These proteins are known as wnt-2 (also known as irp), wnt-3, -3A, -4, -5A, -5B, -6, -7A, -7B, -8, -8B, -9 and -10. At least four members of this family are present in Drosophila; one of them, wingless (wg), is implicated in segmentation polarity. All these proteins share the following features characteristics of secretory proteins: a signal peptide, several potential N-glycosylation sites and 22 conserved cysteines that are probably involved in disulfide bonds. The Wnt proteins seem to adhere to the plasma membrane of the secreting cells and are therefore likely to signal over only few cell diameters. The consensus pattern, which is based upon a highly conserved region including three cysteines, is as follows: C-K-C-H-G-[LIVMT]-S-G-x-C. All sequences known to belong to this family are detected by the provided consensus pattern.

[0419] s) Ww/rsp5/WWP Domain-Containing Proteins.

[0420] SEQ ID NOS:188, 379, and 395 represent polynucleotides encoding a polypeptide in the family of WW/rsp5/WWP domain-containing proteins. The WW domain (Bork et al., Trends Biochem. Sci. (1994) 19:531; Andre et al., Biochem. Biophys. Res. Commun. (1994) 205:1201; Hofmann et al., FEBS Lett. (1995) 358:153; and Sudol et al., FEBS Lett. (1995) 369:67), also known as rsp5 or WWP), was originally discovered as a short conserved region in a number of unrelated proteins, among them dystrophin, the gene responsible for Duchenne muscular dystrophy. The domain, which spans about 35 residues, is repeated up to 4 times in some proteins. It has been shown (Chen et al., Proc. Natl. Acad. Sci. USA (1995) 92:7819) to bind proteins with particular proline-motifs, [AP]-P-P-[AP]-Y, and thus resembles somewhat SH3 domains. It appears to contain beta-strands grouped around four conserved aromatic positions, generally Trp. The name WW or WWP derives from the presence of these Trp as well as that of a conserved Pro. It is frequently associated with other domains typical for proteins in signal transduction processes.

[0421] Proteins containing the WW domain include:

[0422] 1. Dystrophin, a multidomain cytoskeletal protein. Its longest alternatively spliced form consists of an N-terminal actin-binding domain, followed by 24 spectrin-like repeats, a cysteine-rich calcium-binding domain and a C-terminal globular domain. Dystrophins form tetramers and is thought to have multiple functions including involvement in membrane stability, transduction of contractile forces to the extracellular environment and organization of membrane specialization. Mutations in the dystrophin gene lead to muscular dystrophy of Duchenne or Becker type. Dystrophin contains one WW domain C-terminal of the spectrin-repeats.

[0423] 2. Vertebrate YAP protein, which is a substrate of an unknown serine kinase. It binds to the SH3 domain of the Yes oncoprotein via a proline-rich region. This protein appears in alternatively spliced isoforms, containing either one or two WW domains.

[0424] 3. IQGAP, which is a human GTPase activating protein acting on ras. It contains an N-terminal domain similar to fly muscle mp20 protein and a C-terminal ras GTPase activator domain.

[0425] For the sensitive detection of WW domains, the profile spans the whole homology region as well as a pattern. The consensus for this family is: W-x(9,11)-[VFY]-[FYW]-x(6,7)-[GSTNE]-[GSTQCR]-[FYW]-x(2)-P.

[0426] t) Zinc Finger, C2H2 Type.

[0427] SEQ ID NO:61, 306, and 386 correspond to polynucleotides encoding novel members of the of the C2H2 type zinc finger protein family. Zinc finger domains (Klug et al., Trends Biochem. Sci. (1987) 12:464; Evans et al., Cell (1988) 52:1; Payre et al., FEBS Lett. (1988) 234:245; Miller et al., EMBO J. (1985) 4:1609; and Berg, Proc. Natl. Acad. Sci. USA (1988) 85:99) are nucleic acid-binding protein structures first identified in the Xenopus transcription factor TFIIIA. These domains have since been found in numerous nucleic acid-binding proteins. A zinc finger domain is composed of 25 to 30 amino acid residues. Two cysteine or histidine residues are positioned at both extremities of the domain, which are involved in the tetrahedral coordination of a zinc atom. It has been proposed that such a domain interacts with about five nucleotides.

[0428] Many classes of zinc fingers are characterized according to the number and positions of the histidine and cysteine residues involved in the zinc atom coordination. In the first class to be characterized, called C2H2, the first pair of zinc coordinating residues are cysteines, while the second pair are histidines. A number of experimental reports have demonstrated the zinc-dependent DNA or RNA binding property of some members of this class.

[0429] Mammalian proteins having a C2H2 zipper include (number in parenthesis indicates number of zinc finger regions in the protein): basonuclin (6), BCL-6/LAZ-3 (6), erythroid krueppel-like transcription factor (3), transcription factors Sp1 (3), Sp2 (3), Sp3 (3) and Sp(4) 3, transcriptional repressor YY1 (4), Wilms' tumor protein (4), EGR1/Krox24 (3), EGR2/Krox20 (3), EGR3/Pilot (3), EGR4/AT133 (4), Evi-1 (10), GLI1 (5), GLI2 (4+), GLI3 (3+), HIV-EP1/ZNF40 (4), HIV-EP2 (2), KR1 (9+), KR2 (9), KR3 (15+), KR4 (14+), KR5 (11+), HF.12 (6+), REX-1 (4), ZfX (13), ZfY (13), Zfp-35 (18), ZNF7 (15), ZNF8 (7), ZNF35 (10), ZNF42/MZF-1 (13), ZNF43 (22), ZNF46/Kup (2), ZNF76 (7), ZNF91 (36), ZNF133 (3).

[0430] In addition to the conserved zinc ligand residues, it has been shown that a number of other positions are also important for the structural integrity of the C2H2 zinc fingers. (Rosenfeld et al., J. Biomol. Struct. Dyn. (1993) 11:557) The best conserved position is found four residues after the second cysteine; it is generally an aromatic or aliphatic residue. The consensus pattern for C2H2 zinc fingers is: C-x(2,4)-C-x(3)-[LIVMFYWC]-x(8)-H-x(3,5)-H. The two C's and two H's are zinc ligands.

[0431] u) Zinc Finger, CCHC Class.

[0432] SEQ ID NO:322 corresponds to a polynucleotide encoding a novel member of the zinc finger CCHC family. The CCHC zinc finger protein family to date has been mostly composed of retroviral gag proteins (nucleocapsid). The prototype structure of this family is from HIV. The family also contains members involved in eukaryotic gene regulation, such as C. elegans GLH-1. The consensus sequence of this family is based upon the common structure of an 18-residue zinc finger.

[0433] v) Zinc-Binding Metalloprotease Domain.

[0434] SEQ ID NO:306 and 395 represent polynucleotides encoding novel members of the zinc-binding metalloprotease domain protein family. The majority of zinc-dependent metallopeptidases (with the notable exception of the carboxypeptidases) share a common pattern of primary structure (Jongeneel et al., FEBS Lett. (1989) 242:211; Murphy et al., FEBS Lett. (1991) 289:4; and Bode et al., Zoology (1996) 99:237) in the part of their sequence involved in the binding of zinc, and can be grouped together as a superfamily, known as the metzincins, on the basis of this sequence similarity. Examples of these proteins include: 1) Angiotensin-converting enzyme (EC 3.4.15.1) (dipeptidyl carboxypeptidase I) (ACE), the enzyme responsible for hydrolyzing angiotensin I to angiotensin II. 2) Mammalian extracellular matrix metalloproteinases (known as matrixins) (Woessner, FASEB J. (1991) 5:2145): MMP-1 (EC 3.4.24.7) (interstitial collagenase), MMP-2 (EC 3.4.24.24) (72 Kd gelatinase), MMP-9 (EC 3.4.24.35) (92 Kd gelatinase), MMP-7 (EC 3.4.24.23) (matrylisin), MMP-8 (EC 3.4.24.34) (neutrophil collagenase), MMP-3 (EC 3.4.24.17) (stromelysin-1), MMP-10 (EC 3.4.24.22) (stromelysin-2), and MMP-11 (stromelysin-3), MMP-12 (EC 3.4.24.65) (macrophage metalloelastase). 3) Endothelin-converting enzyme 1 (EC 3.4.24.71) (ECE-1), which processes the precursor of endothelin to release the active peptide.

[0435] A signature pattern which includes the two histidine and the glutamic acid residues is sufficient to detect this superfamily of proteins, having the consensus pattern: [GSTALIVN]-x(2)-H-E-[LIVMFYW]-{DEHRKP}-H-x-[LIVMFYWGSPQ]. The two H's are zinc ligands, and E is the active site residue.

### Example 4

### Differential Expression of Polynucleotides of the Invention: Description of Libraries and Detection of Differential Expression

[0436] The relative expression levels of the polynucleotides of the invention was assessed in several libraries prepared from various sources, including cell lines and patient tissue samples. Table 4 provides a summary of these libraries, including the shortened library name (used hereafter), the mRNA source used to prepared the cDNA library, the “nickname” of the library that is used in the tables below (in quotes), and the approximate number of clones in the library.

TABLE 4
Description of cDNA Libraries

| Library (lib#) | Description | Number of Clones in this Clustering |
|---|---|---|
| 1 | Km12 L4 | 307133 |
| | Human Colon Cell Line, High Metastatic Potential | |
| | (derived from Km12C) | |
| | “High Colon” | |
| 2 | Km12C | 284755 |
| | Human Colon Cell Line, Low Metastatic Potential | |
| | “Low Colon” | |
| 3 | MDA-MB-231 | 326937 |
| | Human Breast Cancer Cell Line, High Metastatic | |
| | Potential; micro-metastases in lung | |
| | “High Breast” | |
| 4 | MCF7 | 318979 |
| | Human Breast Cancer Cell, Non Metastatic | |
| | “Low Breast” | |
| 8 | MV-522 | 223620 |
| | Human Lung Cancer Cell Line, High Metastatic | |
| | Potential | |
| | “High Lung” | |
| 9 | UCP-3 | 312503 |
| | Human Lung Cancer Cell Line, Low Metastatic Potential | |
| | “Low Lung” | |
| 12 | Human microvascular endothelial cells (HMEC) - | 41938 |
| | Untreated | |
| | PCR (OligodT) cDNA library | |
| 13 | Human microvascular endothelial cells (HMEC) - bFGF | 42100 |
| | treated | |
| | PCR (OligodT) cDNA library | |
| 14 | Human microvascular endothelial cells (HMEC) - VEGF | 42825 |
| | treated | |
| | PCR (OligodT) cDNA library | |
| 15 | Normal Colon - UC#2 Patient | 34285 |
| | PCR (OligodT) cDNA library | |
| | “Normal Colon Tumor Tissue” | |
| 16 | Colon Tumor - UC#2 Patient | 35625 |
| | PCR (OligodT) cDNA library | |
| | “Normal Colon Tumor Tissue” | |
| 17 | Liver Metastasis from Colon Tumor of UC#2 Patient | 36984 |
| | PCR (OligodT) cDNA library | |
| | “High Colon Metastasis Tissue” | |
| 18 | Normal Colon - UC#3 Patient | 36216 |
| | PCR (OligodT) cDNA library | |
| | “Normal Colon Tumor Tissue” | |
| 19 | Colon Tumor - UC#3 Patient | 41388 |
| | PCR (OligodT) cDNA library | |
| | “High Colon Tumor Tissue” | |
| 20 | Liver Metastasis from Colon Tumor of UC#3 Patient | 30956 |
| | PCR (OligodT) cDNA library | |
| | “High Colon Metastasis Tissue” | |

[0437] The KM12L4 and KM12C cell lines are described in Example 1 above. The MDA-MB-231 cell line was originally isolated from pleural effuisions (Cailleau, J. Natl. Cancer. Inst. (1974) 53:661), is of high metastatic potential, and forms poorly differentiated adenocarcinoma grade II in nude mice consistent with breast carcinoma. The MCF7 cell line was derived from a pleural effusion of a breast adenocarcinoma and is non-metastatic. The MV-522 cell line is derived from a human lung carcinoma and is of high metastatic potential. The UCP-3 cell line is a low metastatic human lung carcinoma cell line; the MV-522 is a high metastatic variant of UCP-3. These cell lines are well-recognized in the art as models for the study of human breast and lung cancer (see, e.g., Chandrasekaran et al., Cancer Res. (1979) 39:870 (MDA-MB-231 and MCF-7); Gastpar et al., J Med Chem (1998) 41:4965 (MDA-MB-231 and MCF-7); Ranson et al., Br J Cancer (1998) 77:1586 (MDA-MB-231 and MCF-7); Kuang et al., Nucleic Acids Res (1998) 26:1116 (MDA-MB-231 and MCF-7); Varki et al., Int J Cancer (1987) 40:46 (UCP-3); Varki et al., Tumour Biol. (1990) 11:327; (MV-522 and UCP-3); Varki et al., Anticancer Res. (1990) 10:637; (MV-522); Kelner et al., Anticancer Res (1995) 15:867 (MV-522); and Zhang et al., Anticancer Drugs (1997) 8:696 (MV522)). The samples of libraries 15-20 are derived from two different patients (UC#2, and UC#3).

[0438] Each of the libraries is composed of a collection of cDNA clones that in turn are representative of the mRNAs expressed in the indicated mRNA source. In order to facilitate the analysis of the millions of sequences in each library, the sequences were assigned to clusters. The concept of “cluster of clones” is derived from a sorting/grouping of cDNA clones based on their hybridization pattern to a panel of roughly 300 7 bp oligonucleotide probes (see Drmanac et al., Genomics (1996) 37(1):29). Random cDNA clones from a tissue library are hybridized at moderate stringency to 300 7 bp oligonucleotides. Each oligonucleotide has some measure of specific hybridization to that specific clone. The combination of 300 of these measures of hybridization for 300 probes equals the “hybridization signature” for a specific clone. Clones with similar sequence will have similar hybridization signatures. By developing a sorting/grouping algorithm to analyze these signatures, groups of clones in a library can be identified and brought together computationally. These groups of clones are termed “clusters”. Depending on the stringency of the selection in the algorithm (similar to the stringency of hybridization in a classic library cDNA screening protocol), the “purity” of each cluster can be controlled. For example, artifacts of clustering may occur in computational clustering just as artifacts can occur in “wet-lab” screening of a cDNA library with 400 bp cDNA fragments, at even the highest stringency. The stringency used in the implementation of cluster herein provides groups of clones that are in general from the same cDNA or closely related cDNAs. Closely related clones can be a result of different length clones of the same cDNA, closely related clones from highly related gene families, or splice variants of the same cDNA.

[0439] Differential expression for a selected cluster was assessed by first determining the number of cDNA clones corresponding to the selected cluster in the first library (Clones in 1^{st}), and the determining the number of cDNA clones corresponding to the selected cluster in the second library (Clones in 2^{nd}). Differential expression of the selected cluster in the first library relative to the second library is expressed as a “ratio” of percent expression between the two libraries. In general, the “ratio” is calculated by: 1) calculating the percent expression of the selected cluster in the first library by dividing the number of clones corresponding to a selected cluster in the first library by the total number of clones analyzed from the first library; 2) calculating the percent expression of the selected cluster in the second library by dividing the number of clones corresponding to a selected cluster in a second library by the total number of clones analyzed from the second library; 3) dividing the calculated percent expression from the first library by the calculated percent expression from the second library. If the “number of clones” corresponding to a selected cluster in a library is zero, the value is set at 1 to aid in calculation. The formula used in calculating the ratio takes into account the “depth” of each of the libraries being compared, i.e., the total number of clones analyzed in each library.

[0440] In general, a polynucleotide is said to be significantly differentially expressed between two samples when the ratio value is greater than at least about 2, preferably greater than at least about 3, more preferably greater than at least about 5 , where the ratio value is calculated using the method described above. The significance of differential expression is determined using a z score test (Zar, Biostatistical Analysis, Prentice Hall, Inc., USA, “Differences between Proportions,” pp 296-298 (1974).

[0441] Tables 5 to 7 (inserted before the claims) show the number of clones in each of the above libraries that were analyzed for differential expression. Examples of differentially expressed polynucleotides of particular interest are described in more detail below.

### Example 5

### Polynucleotides Differentially Expressed in High Metastatic Potential Breast Cancer Cells Versus Low Metastatic Breast Cancer Cells

[0442] A number of polynucleotide sequences have been identified that are differentially expressed between cells derived from high metastatic potential breast cancer tissue and low metastatic breast cancer cells. Expression of these sequences in breast cancer can be valuable in determining diagnostic, prognostic and/or treatment information. For example, sequences that are highly expressed in the high metastatic potential cells can be indicative of increased expression of genes or regulatory sequences involved in the metastatic process. A patient sample displaying an increased level of one or more of these polynucleotides may thus warrant more aggressive treatment. In another example, sequences that display higher expression in the low metastatic potential cells can be associated with genes or regulatory sequences that inhibit metastasis, and thus the expression of these polynucleotides in a sample may warrant a more positive prognosis than the gross pathology would suggest.

[0443] The differential expression of these polynucleotides can be used as a diagnostic marker, a prognostic marker, for risk assessment, patient treatment and the like. These polynucleotide sequences can also be used in combination with other known molecular and/or biochemical markers.

[0444] The following table summarizes identified polynucleotides with differential expression between high metastatic potential breast cancer cells and low metastatic potential breast cancer cells.

TABLE 8
Differentially expressed polynucleotides: High metastatic potential breast cancer
vs. low metastatic breast cancer cells

| SEQ ID NO. | Differential Expression | Cluster ID | Clones in 1^{st} Library | Clones in 2^{nd} Library | Ratio |
|---|---|---|---|---|---|
| 9 | High Breast > Low Breast (Lib3 > Lib4) | 2623 | 31 | 4 | 7.561356 |
| 42 | High Breast > Low Breast (Lib3 > Lib4) | 307 | 196 | 75 | 2.549721 |
| 52 | High Breast > Low Breast (Lib3 > Lib4) | 19 | 1364 | 525 | 2.534854 |
| 62 | High Breast > Low Breast (Lib3 > Lib4) | 2623 | 31 | 4 | 7.561356 |
| 65 | High Breast > Low Breast (Lib3 > Lib4) | 5749 | 9 | 0 | 8.780930 |
| 66 | High Breast > Low Breast (Lib3 > Lib4) | 6455 | 6 | 0 | 5.853953 |
| 68 | High Breast > Low Breast (Lib3 > Lib4) | 6455 | 6 | 0 | 5.853953 |
| 114 | High Breast > Low Breast (Lib3 > Lib4) | 2030 | 32 | 4 | 7.805271 |
| 123 | High Breast > Low Breast (Lib3 > Lib4) | 3389 | 13 | 2 | 6.341782 |
| 144 | High Breast > Low Breast (Lib3 > Lib4) | 4623 | 12 | 2 | 5.853953 |
| 172 | High Breast > Low Breast (Lib3 > Lib4) | 102 | 278 | 116 | 2.338217 |
| 178 | High Breast > Low Breast (Lib3 > Lib4) | 3681 | 10 | 1 | 9.756589 |
| 214 | High Breast > Low Breast (Lib3 > Lib4) | 3900 | 8 | 1 | 7.805271 |
| 219 | High Breast > Low Breast (Lib3 > Lib4) | 3389 | 13 | 2 | 6.341782 |
| 223 | High Breast > Low Breast (Lib3 > Lib4) | 1399 | 19 | 7 | 2.648217 |
| 258 | High Breast > Low Breast (Lib3 > Lib4) | 4837 | 10 | 0 | 9.756589 |
| 317 | High Breast > Low Breast (Lib3 > Lib4) | 1577 | 25 | 3 | 8.130490 |
| 379 | High Breast > Low Breast (Lib3 > Lib4) | 260 | 27 | 2 | 13.17139 |
| 4 | Low Breast > High Breast (Lib4 > Lib3) | 3706 | 22 | 4 | 5.637215 |
| 39 | Low Breast > High Breast (Lib4 > Lib3) | 4016 | 6 | 0 | 6.149690 |
| 74 | Low Breast > High Breast (Lib4 > Lib3) | 6268 | 18 | 3 | 6.149690 |
| 81 | Low Breast > High Breast (Lib4 > Lib3) | 40392 | 8 | 1 | 8.199586 |
| 130 | Low Breast > High Breast (Lib4 > Lib3) | 13183 | 7 | 0 | 7.174638 |
| 157 | Low Breast > High Breast (Lib4 > Lib3) | 5417 | 9 | 0 | 9.224535 |
| 162 | Low Breast > High Breast (Lib4 > Lib3) | 9685 | 7 | 0 | 7.174638 |
| 183 | Low Breast > High Breast (Lib4 > Lib3) | 7337 | 16 | 3 | 5.466391 |
| 202 | Low Breast > High Breast (Lib4 > Lib3) | 6124 | 9 | 1 | 9.224535 |
| 298 | Low Breast > High Breast (Lib4 > Lib3) | 1037 | 22 | 4 | 5.637215 |
| 338 | Low Breast > High Breast (Lib4 > Lib3) | 689 | 36 | 17 | 2.170478 |
| 384 | Low Breast > High Breast (Lib4 > Lib3) | 697 | 72 | 30 | 2.459876 |
| 386 | Low Breast > High Breast (Lib4 > Lib3) | 4568 | 9 | 0 | 9.224535 |
| 388 | Low Breast > High Breast (Lib4 > Lib3) | 5622 | 13 | 2 | 6.662164 |

### Example 6

### Polynucleotides Differentially Expressed in High Metastatic Potential Lung Cancer Cells Versus Low Metastatic Lung Cancer Cells

[0445] A number of polynucleotide sequences have been identified that are differentially expressed between cells derived from high metastatic potential lung cancer tissue and low metastatic lung cancer cells. Expression of these sequences in lung cancer tissue can be valuable in determining diagnostic, prognostic and/or treatment information. For example, sequences that are highly expressed in the high metastatic potential cells are associated can be indicative of increased expression of genes or regulatory sequences involved in the metastatic process. A patient sample displaying an increased level of one or more of these polynucleotides may thus warrant more aggressive treatment. In another example, sequences that display higher expression in the low metastatic potential cells can be associated with genes or regulatory sequences that inhibit metastasis, and thus the expression of these polynucleotides in a sample may warrant a more positive prognosis than the gross pathology would suggest.

[0446] The differential expression of these polynucleotides can be used as a diagnostic marker, a prognostic marker, for risk assessment, patient treatment and the like. These polynucleotide sequences can also be used in combination with other known molecular and/or biochemical markers.

[0447] The following table summarizes identified polynucleotides with differential expression between high metastatic potential lung cancer cells and low metastatic potential lung cancer cells:

TABLE 9
Differentially expressed polynucleotides: High metastatic potential lung cancer
vs. low metastatic lung cancer cells

| SEQ ID NO. | Differential Expression | Cluster ID | Clones in 1^{st} Library | Clones in 2^{nd} Library | Ratio |
|---|---|---|---|---|---|
| 400 | High Lung > Low Lung (Lib8 > Lib9) | 14929 | 23 | 16 | 2.008868 |
| 9 | High Lung > Low Lung (Lib8 > Lib9) | 2623 | 6 | 1 | 8.384840 |
| 34 | High Lung > Low Lung (Lib8 > Lib9) | 5832 | 5 | 0 | 6.987366 |
| 42 | High Lung > Low Lung (Lib8 > Lib9) | 307 | 79 | 27 | 4.088903 |
| 62 | High Lung > Low Lung (Lib8 > Lib9) | 2623 | 6 | 1 | 8.384840 |
| 74 | High Lung > Low Lung (Lib8 > Lib9) | 6268 | 5 | 0 | 6.987366 |
| 106 | High Lung > Low Lung (Lib8 > Lib9) | 10717 | 8 | 0 | 11.17978 |
| 119 | High Lung > Low Lung (Lib8 > Lib9) | 8 | 1355 | 122 | 15.52111 |
| 361 | High Lung > Low Lung (Lib8 > Lib9) | 1120 | 5 | 0 | 6.987366 |
| 369 | High Lung > Low Lung (Lib8 > Lib9) | 2790 | 6 | 0 | 8.384840 |
| 371 | High Lung > Low Lung (Lib8 > Lib9) | 8847 | 6 | 1 | 8.384840 |
| 379 | High Lung > Low Lung (Lib8 > Lib9) | 260 | 15 | 0 | 20.96210 |
| 395 | High Lung > Low Lung (Lib8 > Lib9) | 13538 | 9 | 1 | 12.57726 |
| 135 | Low Lung > High Lung (Lib9 > Lib8) | 36313 | 30 | 1 | 21.46731 |
| 154 | Low Lung > High Lung (Lib9 > Lib8) | 5345 | 27 | 6 | 3.220097 |
| 160 | Low Lung > High Lung (Lib9 > Lib8) | 4386 | 21 | 3 | 5.009039 |
| 260 | Low Lung > High Lung (Lib9 > Lib8) | 4141 | 27 | 4 | 4.830145 |
| 308 | Low Lung > High Lung (Lib9 > Lib8) | 15855 | 213 | 12 | 12.70149 |
| 323 | Low Lung > High Lung (Lib9 > Lib8) | 5257 | 25 | 5 | 3.577885 |
| 349 | Low Lung > High Lung (Lib9 > Lib8) | 2797 | 14 | 1 | 10.01807 |
| 381 | Low Lung > High Lung (Lib9 > Lib8) | 2428 | 19 | 2 | 6.797982 |

### Example 7

### Polynucleotides Differentially Expressed in High Metastatic Potential Colon Cancer Cells Versus Low Metastatic Colon Cancer Cells

[0448] A number of polynucleotide sequences have been identified that are differentially expressed between cells derived from high metastatic potential colon cancer tissue and low metastatic colon cancer cells. Expression of these sequences in colon cancer tissue can be valuable in determining diagnostic, prognostic and/or treatment information. For example, sequences that are highly expressed in the high metastatic potential cells can be indicative of increased expression of genes or regulatory sequences involved in the metastatic process. A patient sample displaying an increased level of one or more of these polynucleotides may thus warrant more aggressive treatment. In another example, sequences that display higher expression in the low metastatic potential cells can be associated with genes or regulatory sequences that inhibit metastasis, and thus the expression of these polynucleotides in a sample may warrant a more positive prognosis than the gross pathology would suggest.

[0449] The differential expression of these polynucleotides can be used as a diagnostic marker, a prognostic marker, for risk assessment, patient treatment and the like. These polynucleotide sequences can also be used in combination with other known molecular and/or biochemical markers.

[0450] The following table summarizes identified polynucleotides with differential expression between high metastatic potential colon cancer cells and low metastatic potential colon cancer cells:

TABLE 10
Differentially expressed polynucleotides: High metastatic potential colon cancer
vs. low metastatic colon cancer cells

| SEQ ID NO. | Differential Expression | Cluster ID | Clones in 1^{st} Library | Clones in 2^{nd} Library | Ratio |
|---|---|---|---|---|---|
| 1 | High Colon > Low Colon (Lib1 > Lib2) | 6660 | 7 | 0 | 6.489973 |
| 176 | High Colon > Low Colon (Lib1 > Lib2) | 3765 | 19 | 6 | 2.935940 |
| 241 | High Colon > Low Colon (Lib1 > Lib2) | 4275 | 11 | 2 | 5.099264 |
| 362 | High Colon > Low Colon (Lib1 > Lib2) | 6420 | 8 | 0 | 7.417112 |
| 374 | High Colon > Low Colon (Lib1 > Lib2) | 6420 | 8 | 0 | 7.417112 |
| 39 | Low Colon > High Colon (Lib2 > Lib1) | 4016 | 14 | 5 | 3.020043 |
| 97 | Low Colon > High Colon (Lib2 > Lib1) | 945 | 21 | 9 | 2.516702 |
| 134 | Low Colon > High Colon (Lib2 > Lib1) | 2464 | 19 | 5 | 4.098630 |
| 317 | Low Colon > High Colon (Lib2 > Lib1) | 1577 | 40 | 12 | 3.595289 |
| 357 | Low Colon > High Colon (Lib2 > Lib1) | 4309 | 13 | 4 | 3.505407 |

### Example 8

### Polynucleotides Differentially Expressed at Higher Levels in High Metastatic Potential Colon Cancer Patient Tissue Versus Normal Patient Tissue

[0451] A number of polynucleotide sequences have been identified that are differentially expressed between cells derived from high metastatic potential colon cancer tissue and normal tissue. Expression of these sequences in colon cancer tissue can be valuable in determining diagnostic, prognostic and/or treatment information. For example, sequences that are highly expressed in the high metastatic potential cells are associated can be indicative of increased expression of genes or regulatory sequences involved in the advanced disease state which involves processes such as angiogenesis, dedifferentiation, cell replication, and metastasis. A patient sample displaying an increased level of one or more of these polynucleotides may thus warrant more aggressive treatment.

[0452] The differential expression of these polynucleotides can be used as a diagnostic marker, a prognostic marker, for risk assessment, patient treatment and the like. These polynucleotide sequences can also be used in combination with other known molecular and/or biochemical markers.

[0453] The following table summarizes identified polynucleotides with differential expression between high metastatic potential colon cancer cells and normal colon cells:

TABLE 11
Differentially expressed polynucleotides: High metastatic potential colon tissue
vs. normal colon tissue

| SEQ ID NO. | Differential Expression | Cluster ID | Clones in 1^{st} Library | Clones in 2^{nd} Library | Ratio |
|---|---|---|---|---|---|
| 52 | High Colon Metastasis Tissue > Normal | 19 | 10 | 0 | 11.6991 |
| | Colon Tissue of UC#3 (Lib20 > Lib18) | | | | 8 |
| 52 | High Colon Metastasis Tissue > Normal | 19 | 13 | 2 | 6.02564 |
| | Tissue in UC#2 (Lib17 > Lib15) | | | | 6 |
| 172 | High Colon Metastasis Tissue > Normal | 102 | 65 | 22 | 2.73893 |
| | Tissue in UC#2 (Lib17 > Lib15) | | | | 0 |

### Example 9

### Polynucleotides Differentially Expressed at Higher Levels in High Colon Tumor Potential Patient Tissue Versus Metastasized Colon Cancer Patient Tissue

[0454] A number of polynucleotide sequences have been identified that are differentially expressed between cells derived from high tumor potential colon cancer tissue and cells derived from high metastatic potential colon cancer cells. Expression of these sequences in colon cancer tissue can be valuable in determining diagnostic, prognostic and/or treatment information associated with the transformation of precancerous tissue to malignant tissue. This information can be useful in the prevention of achieving the advanced malignant state in these tissues, and can be important in risk assessment for a patient.

[0455] The following table summarizes identified polynucleotides with differential expression between high tumor potential colon cancer tissue and cells derived from high metastatic potential colon cancer cells:

TABLE 12
Differentially expressed polynucleotides: High tumor potential colon tissue vs.
metastatic colon tissue

| SEQ ID NO. | Differential Expression | Cluster ID | Clones in 1^{st} Library | Clones in 2^{nd} Library | Ratio |
|---|---|---|---|---|---|
| 52 | High Colon Tumor Tissue > Metastasis | 19 | 69 | 10 | 5.16082 |
| | Tissue of UC#3 (Lib19 > Lib20) | | | | 9 |
| 119 | High Colon Tumor Tissue > Metastasis | 8 | 14 | 1 | 10.4712 |
| | Tissue of UC#3 (Lib19 > Lib20) | | | | 4 |
| 172 | High Colon Tumor Tissue > Metastasis | 102 | 43 | 10 | 3.21616 |
| | Tissue of UC#3 (Lib19 > Lib20) | | | | 8 |

### Example 10

### Polynucleotides Differentially Expressed at Higher Levels in High Tumor Potential Colon Cancer Patient Tissue Versus Normal Patient Tissue

[0456] A number of polynucleotide sequences have been identified that are differentially expressed between cells derived from high tumor potential colon cancer tissue and normal tissue. Expression of these sequences in colon cancer tissue can be valuable in determining diagnostic, prognostic and/or treatment information associated with the prevention of achieving the malignant state in these tissues, and can be important in risk assessment for a patient. For example, sequences that are highly expressed in the potential colon cancer cells are associated with or can be indicative of increased expression of genes or regulatory sequences involved in early tumor progression. A patient sample displaying an increased level of one or more of these polynucleotides may thus warrant closer attention or more frequent screening procedures to catch the malignant state as early as possible.

[0457] The following table summarizes identified polynucleotides with differential expression between high metastatic potential colon cancer cells and normal colon cells:

TABLE 13
Differentially expressed polynucleotides: High tumor potential colon tissue vs.
normal colon tissue

| SEQ ID NO. | Differential Expression | Cluster ID | Clones in 1^{st} Library | Clones in 2^{nd} Library | Ratio |
|---|---|---|---|---|---|
| 52 | High Colon Tumor Tissue > Normal | 19 | 13 | 2 | 6.25550 |
| | Tissue of UC#2 (Lib16 > Lib15) | | | | 8 |
| 288 | High Colon Tumor Tissue > Normal | 1267 | 7 | 0 | 6.12525 |
| | Tissue of UC#2 (Lib16 > Lib15) | | | | 3 |
| 52 | High Colon Tumor Tissue > Normal | 19 | 69 | 0 | 60.3775 |
| | Tissue of UC#3 (Lib19 > Lib18) | | | | 0 |
| 119 | High Colon Tumor Tissue > Normal | 8 | 14 | 1 | 12.2505 |
| | Tissue of UC#3 (Lib19 > Lib18) | | | | 0 |
| 172 | High Colon Tumor Tissue > Normal | 102 | 43 | 7 | 5.37522 |
| | Tissue of UC#3 (Lib19 > Lib18) | | | | 2 |

### Example 11

### Polynucleotides Differentially Expressed Across Multiple Libraries

[0458] A number of polynucleotide sequences have been identified that are differentially expressed between cancerous cells and normal cells across all three tissue types tested (i.e., breast, colon, and lung). Expression of these sequences in a tissue or any origin can be valuable in determining diagnostic, prognostic and/or treatment information associated with the prevention of achieving the malignant state in these tissues, and can be important in risk assessment for a patient. These polynucleotides can also serve as non-tissue specific markers of, for example, risk of metastasis of a tumor. The following table summarizes identified polynucleotides that were differentially expressed but without tissue type-specificity in the breast, colon, and lung libraries tested.

TABLE 14
Polynucleotides Differentially Expressed Across Multiple Library Comparisons

| SEQ ID NO. | Differential Expression | Cluster ID | Clones in 1^{st} Library | Clones in 2^{nd} Library | Ratio |
|---|---|---|---|---|---|
| 9 | High Breast > Low Breast (Lib3 > Lib4) | 2623 | 31 | 4 | 7.561356 |
| | High Lung > Low Lung (Lib8 > Lib9) | 2623 | 6 | 1 | 8.384840 |
| 39 | Low Breast > High Breast (Lib4 > Lib3) | 4016 | 6 | 0 | 6.149690 |
| | Low Colon > High Colon (Lib2 > Lib1) | 4016 | 14 | 5 | 3.020043 |
| 42 | High Breast > Low Breast (Lib3 > Lib4) | 307 | 196 | 75 | 2.549721 |
| | High Lung > LowLung (Lib8 > Lib9) | 307 | 79 | 27 | 4.088903 |
| 52 | High Breast > Low Breast (Lib3 > Lib4) | 19 | 1364 | 525 | 2.534854 |
| | High Colon Metastasis Tissue > Normal | 19 | 10 | 0 | 11.69918 |
| | Colon Tissue of UC#3 (Lib20 > Lib 18) | | | | |
| | High Colon Metastasis Tissue > Normal | 19 | 13 | 2 | 6.025646 |
| | Tissue in UC#2 (Lib17 > Lib15) | | | | |
| | High Colon Tumor Tissue > Metastasis | 19 | 69 | 10 | 5.160829 |
| | Tissue of UC#3 (Lib19 > Lib20) | | | | |
| | High Colon Tumor Tissue > Normal | 19 | 13 | 2 | 6.255508 |
| | Tissue of UC#2 (Lib16 > Lib15) | | | | |
| | High Colon Tumor Tissue > Normal | 19 | 69 | 0 | 60.37750 |
| | Tissue of UC#3 (Lib19 > Lib18) | | | | |
| 62 | High Breast > Low Breast (Lib3 > Lib4) | 2623 | 31 | 4 | 7.561356 |
| | High Lung > Low Lung (Lib8 > Lib9) | 2623 | 6 | 1 | 8.384840 |
| 74 | High Lung > Low Lung (Lib8 > Lib9) | 6268 | 5 | 0 | 6.987366 |
| | Low Breast > High Breast (Lib4 > Lib3) | 6268 | 18 | 3 | 6.149690 |
| 119 | High Colon Tumor Tissue > Metastasis | 8 | 14 | 1 | 10.47124 |
| | Tissue of UC#3 (Lib19 > Lib20) | | | | |
| | High Colon Tumor Tissue > Normal | 8 | 14 | 1 | 12.25050 |
| | Tissue of UC#3 (Lib19 > Lib18) | | | | |
| | High Lung > Low Lung (Lib8 > Lib9) | 8 | 1355 | 122 | 15.52111 |
| 172 | High Breast> Low Breast (Lib3 > Lib4) | 102 | 278 | 116 | 2.338217 |
| | High Colon Metastasis Tissue > Normal | 102 | 65 | 22 | 2.738930 |
| | Tissue in UC#2 (Lib17 > Lib15) | | | | |
| | High Colon Tumor Tissue > Metastasis | 102 | 43 | 10 | 3.216168 |
| | Tissue of UC#3 (Lib19 > Lib20) | | | | |
| | High Colon Tumor Tissue > Normal | 102 | 43 | 7 | 5.375222 |
| | Tissue of UC#3 (Lib19 > Lib18) | | | | |
| 317 | High Breast > Low Breast (Lib3 > Lib4) | 1577 | 25 | 3 | 8.130490 |
| | Low Colon > High Colon (Lib2 > Lib1) | 1577 | 40 | 12 | 3.595289 |
| 379 | High Breast > Low Breast (Lib3 > Lib4) | 260 | 27 | 2 | 13.17139 |
| | High Lung > Low Lung (Lib8 > Lib9) | 260 | 15 | 0 | 20.96210 |

### Example 12

### Polynucleotides Exhibiting Colon-Specific Expression

[0459] The cDNA libraries described herein were also analyzed to identify those polynucleotides that were specifically expressed in colon cells or tissue, i.e., the polynucleotides were identified in libraries prepared from colon cell lines or tissue, but not in libraries of breast or lung origin. The polynucleotides that were expressed in a colon cell line and/or in colon tissue, but were present in the breast or lung cDNA libraries described herein, are shown in Table 15.

TABLE 15
Polynucleotides specifically expressed in colon cells.

| | | Clones in | Clones in |
|---|---|---|---|
| SEQ ID | | 1^{st} | 2^{nd} |
| NO. | Cluster | Library | Library |
| 5 | 36535 | 2 | 0 |
| 13 | 27250 | 2 | 0 |
| 19 | 16283 | 3 | 0 |
| 24 | 16918 | 4 | 0 |
| 26 | 40108 | 2 | 0 |
| 32 | 32663 | 1 | 1 |
| 43 | 39833 | 2 | 0 |
| 47 | 18957 | 3 | 0 |
| 48 | 39508 | 2 | 0 |
| 56 | 7005 | 8 | 2 |
| 58 | 18957 | 3 | 0 |
| 59 | 18957 | 3 | 0 |
| 60 | 16283 | 3 | 0 |
| 64 | 13238 | 4 | 1 |
| 70 | 39442 | 2 | 0 |
| 71 | 17036 | 4 | 0 |
| 73 | 7005 | 8 | 2 |
| 83 | 11476 | 6 | 0 |
| 86 | 39425 | 2 | 0 |
| 94 | 21847 | 2 | 1 |
| 100 | 16731 | 3 | 1 |
| 101 | 12439 | 4 | 0 |
| 113 | 17055 | 4 | 0 |
| 120 | 67907 | 1 | 0 |
| 121 | 12081 | 4 | 0 |
| 124 | 39174 | 2 | 0 |
| 126 | 8210 | 2 | 6 |
| 128 | 40455 | 2 | 0 |
| 139 | 22195 | 3 | 0 |
| 143 | 86859 | 1 | 0 |
| 150 | 8672 | 4 | 4 |
| 153 | 16977 | 4 | 0 |
| 156 | 17036 | 4 | 0 |
| 159 | 40044 | 2 | 0 |
| 161 | 40044 | 2 | 0 |
| 163 | 22155 | 3 | 0 |
| 166 | 15066 | 4 | 0 |
| 170 | 11465 | 5 | 0 |
| 176 | 3765 | 19 | 6 |
| 181 | 86110 | 1 | 0 |
| 182 | 39648 | 2 | 0 |
| 185 | 17076 | 4 | 0 |
| 186 | 22794 | 2 | 0 |
| 187 | 39171 | 2 | 0 |
| 194 | 40455 | 2 | 0 |
| 199 | 16317 | 3 | 0 |
| 210 | 39186 | 2 | 0 |
| 211 | 40122 | 2 | 0 |
| 218 | 26295 | 2 | 0 |
| 222 | 4665 | 5 | 9 |
| 226 | 82498 | 1 | 0 |
| 227 | 35702 | 2 | 0 |
| 229 | 39648 | 2 | 0 |
| 231 | 85064 | 1 | 0 |
| 234 | 39391 | 2 | 0 |
| 236 | 39498 | 2 | 0 |
| 242 | 22113 | 3 | 0 |
| 247 | 19255 | 2 | 0 |
| 252 | 22814 | 3 | 0 |
| 253 | 39563 | 2 | 0 |
| 254 | 39420 | 2 | 0 |
| 257 | 39412 | 2 | 0 |
| 261 | 38085 | 2 | 0 |
| 265 | 40054 | 1 | 0 |
| 266 | 39423 | 2 | 0 |
| 267 | 39453 | 2 | 0 |
| 270 | 78091 | 1 | 0 |
| 276 | 39168 | 2 | 0 |
| 277 | 39458 | 2 | 0 |
| 278 | 14391 | 3 | 1 |
| 279 | 39195 | 2 | 0 |
| 282 | 12977 | 5 | 0 |
| 284 | 14391 | 3 | 1 |
| 290 | 16347 | 4 | 0 |
| 293 | 39478 | 2 | 0 |
| 294 | 39392 | 2 | 0 |
| 297 | 39180 | 2 | 0 |
| 299 | 6867 | 7 | 3 |
| 301 | 41633 | 1 | 1 |
| 302 | 23218 | 3 | 0 |
| 303 | 39380 | 2 | 0 |
| 309 | 84328 | 1 | 0 |
| 314 | 14367 | 3 | 0 |
| 320 | 39886 | 2 | 0 |
| 324 | 9061 | 5 | 2 |
| 327 | 16653 | 3 | 1 |
| 328 | 16985 | 4 | 0 |
| 329 | 12977 | 5 | 0 |
| 330 | 9061 | 5 | 2 |
| 333 | 16392 | 3 | 0 |
| 342 | 39486 | 2 | 0 |
| 344 | 6874 | 6 | 3 |
| 345 | 6874 | 6 | 3 |
| 353 | 11494 | 4 | 0 |
| 354 | 17062 | 3 | 0 |
| 355 | 16245 | 4 | 0 |
| 356 | 83103 | 1 | 0 |
| 358 | 13072 | 4 | 1 |
| 366 | 14364 | 1 | 0 |
| 368 | 84182 | 1 | 0 |
| 372 | 56020 | 1 | 0 |
| 389 | 7514 | 5 | 3 |
| 391 | 7570 | 5 | 3 |
| 393 | 23210 | 3 | 0 |

[0460] In addition to the above, SEQ ID NOS:159 and 161 were each present in one clone in each of Lib16 (Normal Colon Tumor Tissue), and SEQ ID NOS:344 and 345 were each present in one clone in Libl7 (High Colon Metastasis Tissue). No clones corresponding to the colon-specific polynucleotides in the table above were present in any of Libraries 3, 4, 8, or 9. The polynucleotide provided above can be used as markers of cells of colon origin, and find particular use in reference arrays, as described above.

### Example 13

### Identification of Contiguous Sequences Having a Polynucleotide of the Invention

[0461] The novel polynucleotides were used to screen publicly available and proprietary databases to determine if any of the polynucleotides of SEQ ID NOS:1-404 would facilitate identification of a contiguous sequence, e.g, the polynucleotides would provide sequence that would result in 5′ extension of another DNA sequence, resulting in production of a longer contiguous sequence composed of the provided polynucleotide and the other DNA sequence(s). Contiging was performed using the AssemblyLign program with the following parameters: 1) Overlap: Minimum Overlap Length: 30;% Stringency: 50; Minimum Repeat Length: 30; Alignment: gap creation penalty: 1.00, gap extension penalty: 1.00; 2) Consensus: % Base designation threshold: 80.

[0462] Using these parameters, 44 polynucleotides provided contiged sequences. These contiged sequences are provided as SEQ ID NOS:801-844. The contiged sequences can be correlated with the sequences of SEQ ID NOS:1-404 upon which the contiged sequences are based by identifying those sequences of SEQ ID NOS:1-404 and the contiged sequences of SEQ ID NOS:801-844 that share the same clone name in Table 1. It should be noted that of these 44 sequences that provided a contiged sequence, the following members of that group of 44 did not contig using the overlap settings indicated in parentheses (Stringency/Overlap): SEQ ID NO:804 (30%/10); SEQ ID NO:810 (20%/20); SEQ ID NO:812 (30%/10); SEQ ID NO:814 (40%/20); SEQ ID NO:816 (30%/10); SEQ ID NO:832 (30%/10); SEQ ID NO:840 (20%/20); SEQ ID NO:841 (40%/20). To generalize, the indicated polynucleotides did not contig using a minimum 20% stringency, 10 overlap. There was a corresponding increase in the number of degenerate codons in these sequences.

[0463] The contiged sequences (SEQ ID NO:801-844) thus represent longer sequences that encompass a polynucleotide sequence of the invention. The contiged sequences were then translated in all three reading frames to determine the best alignment with individual sequences using the BLAST programs as described above for SEQ ID NOS:1-404 and the validation sequences SEQ ID NOS:405-800. Again the sequences were masked using the XBLAST profram for masking low complexity as described above in Example 1 (Table 2). Several of the contiged sequences were found to encode polypeptides having characteristics of a polypeptide belonging to a known protein families (and thus represent new members of these protein families) and/or comprising a known functional domain (Table 16). Thus the invention encompasses fragments, fusions, and variants of such polynucleotides that retain biological activity associated with the protein family and/or functional domain identified herein.

TABLE 16
Profile hits using contiged sequences

| SEQ ID | | | Start | |
|---|---|---|---|---|
| NO. | Sequence Name | Profile | (Stop) | Score |
| 809 | Contig_RTA00000177AF.n.18.3. | ATPases | 778 | 6040 |
| | Seq_THC 123051 | | (1612) | |
| 824 | Contig_RTA00000187AF.g.24.1. | homeobox | 531 | 12080 |
| | Sec_THC168636 | | (707) | |
| 824 | Contig_RTA00000187AF.g.24.1. | MAP kinase | 769 | 5784 |
| | Seq_THC 168636 | kinase | (1494) | |
| 833 | Contig_RTA00000190AF.j.4.1. | protein kinase | 170 | 5027 |
| | Seq_THC228776 | | (1010) | |
| 833 | Contig_RTA00000190AF.j.4.1. | protein kinase | 170 | 5027 |
| | Seq_THC228776 | | (1010) | |

All stop/start sequences are provided in the forward direction.

[0464] The profiles for the ATPases (AAA) and protein kinase families are described above in Example 2. The homeobox and MAP kinase kinase protein families are described further below.

[0465] Homeobox Domain.

[0466] The ‘homeobox’ is a protein domain of 60 amino acids (Gehring In: Guidebook to the Homeobox Genes, Duboule D., Ed., pp1-10, Oxford University Press, Oxford, (1994); Buerglin In: Guidebook to the Homeobox Genes, pp25-72, Oxford University Press, Oxford, (1994); Gehring Trends Biochem. Sci. (1992) 1 7:277-280; Gehring et al Annu. Rev. Genet. (1986) 20:147-173; Schofield Trends Neurosci. (1987) 10:3-6; http://copan.bioz.unibas.ch/homeo.html) first identified in number of Drosophila homeotic and segmentation proteins. It is extremely well conserved in many other animals, including vertebrates. This domain binds DNA through a helix-turn-helix type of structure. Several proteins that contain a homeobox domain play an important role in development. Most of these proteins are sequence-specific DNA-binding transcription factors. The homeobox domain is also very similar to a region of the yeast mating type proteins. These are sequence-specific DNA-binding proteins that act as master switches in yeast differentiation by controlling gene expression in a cell type-specific fashion.

[0467] A schematic representation of the homeobox domain is shown below. The helix-turn-helix region is shown by tne symbols ‘H’ (for helix), and ‘t’ (for turn).

xxxxxxxxxxxxxxxxxxxxxxxxxxxxxxHHHHHHHHtttHHHHHHHHHxxxxxxxxxx
1 60

[0468] The pattern detects homeobox sequences 24 residues long and spans positions 34 to 57 of the homeobox domain. The consensus pattern is as follows: [LIVMFYG]-[ASLVR]-x(2)-[LIVMSTACN]-x-[LIVM]-x(4)-[LIV]-[RKNQESTAIY]-[LIVFSTNKH]-W-[FYVC]-x-[NDQTAH]-x(5)-[RKNAIMW].

[0469] MAP Kinase Kinase (MAPKK).

[0470] MAP kinases (MAPK) are involved in signal transduction, and are important in cell cycle and cell growth controls. The MAP kinase kinases (MAPKK) are dual-specificity protein kinases which phosphorylate and activate MAP kinases. MAPKK homologues have been found in yeast, invertebrates, amphibians, and mammals. Moreover, the MAPKK/MAPK phosphorylation switch constitutes a basic module activated in distinct pathways in yeast and in vertebrates. MAPKK regulation studies have led to the discovery of at least four MAPKK convergent pathways in higher organisms. One of these is similar to the yeast pheromone response pathway which includes the ste11 protein kinase. Two other pathways require the activation of either one or both of the serine/threonine kinase-encoded oncogenes c-Raf-1 and c-Mos. Additionally, several studies suggest a possible effect of the cell cycle control regulator cyclin-dependent kinase 1 (cdc2) on MAPKK activity. Finally, MAPKKs are apparently essential transducers through which signals must pass before reaching the nucleus. For review, see, e.g., Biologique Biol Cell (1993) 79:193-207; Nishida et al., Trends Biochem Sci (1993) 18:128-31; Ruderman Curr Opin Cell Biol (1993) 5:207-13; Dhanasekaran et al., Oncogene (1998) 17:1447-55; Kiefer et al., Biochem Soc Trans (1997) 25:491-8; and Hill, Cell Signal (1996) 8:533-44.

[0471] Those skilled in the art will recognize, or be able to ascertain, using not more than routine experimentation, many equivalents to the specific embodiments of the invention described herein. Such specific embodiments and equivalents are intended to be encompassed by the following claims.

[0472] All publications and patent applications cited in this specification are herein incorporated by reference as if each individual publication or patent application were specifically and individually indicated to be incorporated by reference. The citation of any publication is for its disclosure prior to the filing date and should not be construed as an admission that the present invention is not entitled to antedate such publication by virtue of prior invention.

[0473] Although the foregoing invention has been described in some detail by way of illustration and example for purposes of clarity of understanding, it is readily apparent to those of ordinary skill in the art in light of the teachings of this invention that certain changes and modifications may be made thereto without departing from the spirit or scope of the appended claims.

[0474] Deposit Information:

[0475] The following materials were deposited with the American Type Culture Collection: CMCC=(Chiron Master Culture Collection)

Cell Lines Deposited with ATCC

| | | ATCC | CMCC |
|---|---|---|---|
| Cell Line | Deposit Date | Accession No. | Accession No. |
| KM12L4-A | Mar. 19, 1998 | CRL-12496 | 11606 |
| Km12C | May 15, 1998 | CRL-12533 | 11611 |
| MDA-MB-231 | May 15, 1998 | CRL-12532 | 10583 |
| MCF-7 | Oct. 9, 1998 | CRL-12584 | 10377 |

CMCC = (Chiron Master Culture Collection)

[0476] CDNA Library Deposits
cDNA Library ES1 - ATCC#
Deposit Date - Dec. 22, 1998

| Clone Name | Cluster ID | Sequence Name |
|---|---|---|
| M00001395A:C03 | 4016 | 79.A1.sp6:130016.Seq |
| M00001395A:C03 | 4016 | RTA00000118A.c.4.1 |
| M00001449A:D12 | 3681 | RTA00000131A.g.15.2 |
| M00001449A:D12 | 3681 | 79.E1.sp6:130064.Seq |
| M00001452A:D08 | 1120 | 79.C2.sp6:130041.Seq |
| M00001452A:D08 | 1120 | RTA00000118A.p.15.3 |
| M00001513A:B06 | 4568 | 79.D4.sp6:130055.Seq |
| M00001513A:B06 | 4568 | RTA00000122A.d.15.3 |
| M00001517A:B07 | 4313 | 79.F4.sp6:130079.Seq |
| M00001517A:B07 | 4313 | RTA00000122A.n.3.1 |
| M00001533A:C11 | 2428 | RTA00000123A.l.21.1 |
| M00001533A:C11 | 2428 | 79.A5.sp6:130020.Seq |
| M00001533A:C11 | 2428 | RTA00000123A.l.21.1.Seq_THC205063 |
| M00001542A:A09 | 22113 | 79.F5.sp6:130080.Seq |
| M00001542A:A09 | 22113 | RTA00000125A.c.7.1 |
| M00001343C:F10 | 2790 | 80.E1.sp6:130256.Seq |
| M00001343C:F10 | 2790 | RTA00000177AF.e.2.1.Seq_THC229461 |
| M00001343C:F10 | 2790 | RTA00000177AF.e.2.1 |
| M00001343D:H07 | 23255 | 100.C1.sp6:131446.Seq |
| M00001343D:H07 | 23255 | RTA00000177AF.e.14.3.Seq_THC228776 |
| M00001343D:H07 | 23255 | 80.F1.sp6:130268.Seq |
| M00001343D:H07 | 23255 | RTA00000177AF.e.14.3 |
| M00001345A:E01 | 6420 | 172.E1.sp6:133925.Seq |
| M00001345A:E01 | 6420 | RTA00000177AF.f.10.3 |
| M00001345A:E01 | 6420 | RTA00000177AF.f.10.3.Seq_THC226443 |
| M00001345A:E01 | 6420 | 80.G1.sp6:130280.Seq |
| M00001347A:B10 | 13576 | 80.D2.sp6:130245.Seq |
| M00001347A:B10 | 13576 | 100.E1.sp6:131470.Seq |
| M00001347A:B10 | 13576 | RTA00000177AF.g.16.1 |
| M00001353A:G12 | 8078 | 80.E3.sp6:130258.Seq |
| M00001353A:G12 | 8078 | RTA00000177AR.l.13.1 |
| M00001353A:G12 | 8078 | 172.C3.sp6:133903.Seq |
| M00001353D:D10 | 14929 | RTA00000177AF.m.1.2 |
| M00001353D:D10 | 14929 | 80.F3.sp6:130270.Seq |
| M00001353D:D10 | 14929 | 172.D3.sp6:133915.Seq |
| M00001361A:A05 | 4141 | 80.B4.sp6:130223.Seq |
| M00001361A:A05 | 4141 | RTA00000177AF.p.20.3 |
| M00001362B:D10 | 5622 | 80.D4.sp6:130247.Seq |
| M00001362B:D10 | 5622 | RTA00000178AF.a.11.1 |
| M00001362C:H11 | 945 | RTA00000178AR.a.20.1 |
| M00001362C:H11 | 945 | 100.E4.sp6:131473.Seq |
| M00001362C:H11 | 945 | 80.E4.sp6:130259.Seq |
| M00001362C:H11 | 945 | 180.C2.sp6:135940.Seq |
| M00001376B:G06 | 17732 | RTA00000178AR.i.2.2 |
| M00001376B:G06 | 17732 | 80.B5.sp6:130224.Seq |
| M00001387A:C05 | 2464 | 80.D6.sp6:130249.Seq |
| M00001387A:C05 | 2464 | RTA00000178AF.n.18.1 |
| M00001412B:B10 | 8551 | RTA00000179AF.p.21.1 |
| M00001412B:B10 | 8551 | 80.G7.sp6:130286.Seq |
| M00001415A:H06 | 13538 | 80.B8.sp6:130227.Seq |
| M00001415A:H06 | 13538 | RTA00000180AF.a.24.1 |
| M00001416B:H11 | 8847 | 80.C8.sp6:130239.Seq |
| M00001416B:H11 | 8847 | RTA00000180AF.b.16.1 |
| M00001429D:D07 | 40392 | RTA00000180AF.j.8.1 |
| M00001429D:D07 | 40392 | 80.H9.sp6:130300.Seq |
| M00001448D:H01 | 36313 | 80.A11.sp6:130218.Seq |
| M00001448D:H01 | 36313 | RTA00000181AF.e.23.1 |
| M00001463C:B11 | 19 | RTA00000182AF.b.7.1 |
| M00001463C:B11 | 19 | 89.D1.sp6:130703.Seq |
| M00001470A:B10 | 1037 | 89.F2.sp6:130728.Seq |
| M00001470A:B10 | 1037 | RTA00000121A.f.8.1 |
| M00001497A:G02 | 2623 | 89.F3.sp6:130729.Seq |
| M00001497A:G02 | 2623 | RTA00000183AF.a.6.1 |
| M00001500A:E11 | 2623 | RTA00000183AF.b.14.1 |
| M00001500A:E11 | 2623 | 89.A4.sp6:130670.Seq |
| M00001501D:C02 | 9685 | RTA00000183AF.c.11.1.Seq_THC109544 |
| M00001501D:C02 | 9685 | RTA00000183AF.c.11.1 |
| M00001501D:C02 | 9685 | 89.C4.sp6:130694.Seq |
| M00001504C:H06 | 6974 | 89.F4.sp6:130730.Seq |
| M00001504C:H06 | 6974 | RTA00000183AF.d.9.1 |
| M00001504C:H06 | 6974 | RTA00000183AF.d.9.1.Seq_THC223129 |
| M00001504D:G06 | 6420 | 173.F5.SP6:134133.Seq |
| M00001504D:G06 | 6420 | 89.G4.sp6:130742.Seq |
| M00001504D:G06 | 6420 | RTA00000183AF.d.11.1.Seq_THC226443 |
| M00001504D:G06 | 6420 | RTA00000183AF.d.11.1 |
| M00001528A:C04 | 35555 | 89.B6.sp6:130684.Seq |
| M00001528A:C04 | 7337 | RTA00000123A.b.17.1 |
| M00001528A:C04 | 35555 | 184.A5.sp6:135530.Seq |
| M00001537B:G07 | 3389 | RTA00000183AF.m.19.1 |
| M00001537B:G07 | 3389 | 89.A8.sp6:130674.Seq |
| M00001541A:D02 | 3765 | 89.C8.sp6:130698.Seq |
| M00001541A:D02 | 3765 | RTA00000135A.d.1.1 |
| M00001544B:B07 | 6974 | 89.A9.sp6:130675.Seq |
| M00001544B:B07 | 6974 | RTA00000184AF.a.15.1 |
| M00001546A:G11 | 1267 | 89.D9.sp6:130711.Seq |
| M00001546A:G11 | 1267 | RTA00000125A.o.5.1 |
| M00001549B:F06 | 4193 | 89.G9.sp6:130747.Seq |
| M00001549B:F06 | 4193 | RTA00000184AF.e.13.1 |
| M00001556A:F11 | 1577 | 173.C9.SP6:134101.Seq |
| M00001556A:F11 | 1577 | 89.F11.sp6:130737.Seq |
| M00001556A:F11 | 1577 | RTA00000184AF.i.23.1 |
| M00001556B:C08 | 4386 | RTA00000184AF.j.4.1 |
| M00001556B:C08 | 4386 | 89.H11.sp6:130761.Seq |
| M00001563B:F06 | 102 | RTA00000184AF.o.5.1 |
| M00001563B:F06 | 102 | 90.B1.sp6:130871.Seq |
| M00001571C:H06 | 5749 | 90.E1.sp6:130907.Seq |
| M00001571C:H06 | 5749 | RTA00000185AF.a.19.1 |
| M00001594B:H04 | 260 | 90.D2.sp6:130896.Seq |
| M00001594B:H04 | 260 | RTA00000185AR.i.12.2 |
| M00001597C:H02 | 4837 | 90.E2.sp6:130908.Seq |
| M00001597C:H02 | 4837 | RTA00000185AR.k.3.2 |
| M00001624C:F01 | 4309 | 90.C4.sp6:130886.Seq |
| M00001624C:F01 | 4309 | RTA00000186AF.e.22.1 |
| M00001679A:A06 | 6660 | 90.F6.sp6:130924.Seq |
| M00001676A:A06 | 6660 | 122.B5.sp6:132089.Seq |
| M00001679A:A06 | 6660 | RTA00000187AF.h.15.1 |
| M00003759B:B09 | 697 | 90.G8.sp6:130938.Seq |
| M00003759B:B09 | 697 | RTA00000188AF.d.6.1 |
| M00003759B:B09 | 697 | RTA00000188AF.d.6.1.Seq_THC178884 |
| M00003844C:B11 | 6539 | 176.D9.sp6:134556.Seq |
| M00003844C:B11 | 6539 | RTA00000189Af.d.22.1 |
| M00003844C:B11 | 6539 | 90.B10.sp6:130880.Seq |
| M00003857A:G10 | 3389 | 90.A11.sp6:130869.Seq |
| M00003857A:G10 | 3389 | RTA00000189AF.g.3.1 |
| M00003914C:F05 | 3900 | 99.E1.sp6:131278.Seq |
| M00003914C:F05 | 3900 | RTA00000190AF.g.13.1 |
| M00003922A:E06 | 23255 | RTA00000190AF.j.4.1 |
| M00003922A:E06 | 23255 | 99.F1.sp6:131290.Seq |
| M00003922A:E06 | 23255 | RTA00000190AF.j.4.1.Seq_THC228776 |
| M00003983A:A05 | 9105 | 99.C3.sp6:131256.Seq |
| M00003983A:A05 | 9105 | RTA00000191AF.a.21.2 |
| M00004028D:A06 | 6124 | RTA00000191AR.e.2.3 |
| M00004028D:A06 | 6124 | 99.D3.sp6:131268.Seq |
| M00004031A:A12 | 9061 | RTA00000191AR.e.11.2 |
| M00004031A:A12 | 9061 | RTA00000191AR.e.11.3 |
| M00004087D:A01 | 6880 | RTA00000191AF.m.20.1 |
| M00004087D:A01 | 6880 | 99.A5.sp6:131234.Seq |
| M00004108A:E06 | 4937 | 99.E5.sp6:131282.Seq |
| M00004108A:E06 | 4937 | RTA00000191AF.p.21.1 |
| M00004114C:F11 | 13183 | 123.D5.sp6:132305.Seq |
| M00004114C:F11 | 13183 | RTA00000192AF.a.24.1 |
| M00004114C:F11 | 13183 | 99.G5.sp6:131306.Seq |
| M00004146C:C11 | 5257 | 99.B6.sp6:131247.Seq |
| M00004146C:C11 | 5257 | 177.F5.sp6:134768.Seq |
| M00004146C:C11 | 5257 | RTA00000192AF.f.3.1 |
| M00004146C:C11 | 5257 | RTA00000192AF.f.3.1.Seq_THC213833 |
| M00004157C:A09 | 6455 | RTA00000192AF.g.23.1 |
| M00004157C:A09 | 6455 | 99.D6.sp6:131271.Seq |
| M00004157C:A09 | 6455 | 123.E7.sp6:132319.Seq |
| M00004172C:D08 | 11494 | RTA00000192AF.j.6.1 |
| M00004172C:D08 | 11494 | 99.G6.sp6:131307.Seq |
| M00004172C:D08 | 11494 | 177.E6.sp6:134757.Seq |
| M00004229B:F08 | 6455 | RTA00000193AF.b.9.1 |
| M00004229B:F08 | 6455 | 99.C8.sp6:131261.Seq |
| M00001466A:E07 | 4275 | RTA00000120A.j.14.1 |
| M00001531A:H11 | | 89.F6.sp6:130732.Seq |
| M00001531A:H11 | | RTA00000123A.g.19.1 |
| M00001551A:B10 | 6268 | 79.G9.sp6:130096.Seq |
| M00001551A:B10 | 6268 | 184.C12.sp6:135561.Seq |
| M00001551A:B10 | 6268 | RTA00000126A.o.23.1 |
| M00001552A:B12 | 307 | RTA00000136A.o.4.2 |
| M00001552A:B12 | 307 | 79.C7.sp6:130046.Seq |
| M00001556A:H01 | 15855 | RTA00000184AF.j.1.1 |
| M00001586C:C05 | 4623 | RTA00000185AF.f.4.1 |
| M00001604A:B10 | 1399 | 79.G8.sp6:130095.Seq |
| M00001604A:B10 | 1399 | RTA00000129A.o.10.1 |
| M00003879B:C11 | 5345 | RTA00000189AF.l.19.1 |
| M00003879B:C11 | 5345 | 90.B12.sp6:130882.Seq |
| M00001358C:C06 | | RTA00000177AF.o.4.3 |
| M00001388D:G05 | 5832 | 80.F6.sp6:130273.Seq |
| M00001388D:G05 | 5832 | RTA00000178AF.o.23.1 |
| M00001394A:F01 | 6583 | RTA00000179AF.d.13.1 |
| M00001394A:F01 | 6583 | 172.B8.sp6:133896.Seq |
| M00001394A:F01 | 6583 | 80.H6.sp6:130297.Seq |
| M00001429A:H04 | 2797 | RTA00000180AF.i.19.1 |
| M00001447A:G03 | 10717 | RTA00000181AF.d.10.1 |
| M00001448D:C09 | 8 | 80.H10.sp6:130301.Seq |
| M00001448D:C09 | 8 | RTA00000181AF.e.17.1 |
| M00001448D:C09 | 8 | 100.B11.sp6:131444.Seq |
| M00001454D:G03 | 689 | RTA00000181AR.l.22.1 |
| M00003975A:G11 | 12439 | RTA00000190AF.o.24.1 |
| M00003978B:G05 | 5693 | RTA00000190AF.p.17.2.Seq_THC173318 |
| M00003978B:G05 | 5693 | RTA00000190AF.p.17.2 |
| M00004059A:D06 | 5417 | RTA00000191AF.h.19.1 |
| M00004068B:A01 | 3706 | 99.C4.sp6:131257.Seq |
| M00004068B:A01 | 3706 | RTA00000191AF.i.17.2 |
| M00004205D:F06 | | 99.E7.sp6:131284.Seq |
| M00004205D:F06 | | 177.G7.sp6:134782.Seq |
| M00004205D:F06 | | RTA00000192AF.o.11.1 |
| M00004212B:C07 | 2379 | RTA00000192AF.p.8.1 |
| M00004223A:G10 | 16918 | RTA00000193AF.a.16.1 |
| M00004223B:D09 | 7899 | RTA00000193AF.a.17.1 |
| M00004249D:G12 | | RTA00000193AF.c.22.1 |
| M00004251C:G07 | | RTA00000193AF.d.2.1 |
| M00004372A:A03 | 2030 | RTA00000193AF.m.20.1 |
| M00001340B:A06 | 17062 | 80.A1.sp6:130208.Seq |
| M00001340B:A06 | 17062 | RTA00000177AF.b.8.4 |
| M00001340D:F10 | 11589 | 80.B1.sp6:130220.Seq |
| M00001340D:F10 | 11589 | RTA00000177AF.b.17.4 |
| M00001341A:E12 | 4443 | 80.C1.sp6:130232.Seq |
| M00001341A:E12 | 4443 | RTA00000177AF.b.20.4 |
| M00001342B:E06 | 39805 | 80.D1.sp6:130244.Seq |
| M00001342B:E06 | 39805 | RTA00000177AF.c.21.3 |
| M00001346A:F09 | 5007 | RTA00000177AF.g.2.1 |
| M00001346A:F09 | 5007 | 80.H1.sp6:130292.Seq |
| M00001346D:G06 | 5779 | RTA00000177AF.g.14.3 |
| M00001346D:G06 | 5779 | RTA00000177AF.g.14.1 |
| M00001348B:B04 | 16927 | 80.E2.sp6:130257.Seq |
| M00001348B:B04 | 16927 | RTA00000177AF.h.9.3 |
| M00001348B:G06 | 16985 | RTA00000177AF.h.10.1 |
| M00001348B:G06 | 16985 | 80.F2.sp6:130269.Seq |
| M00001349B:B08 | 3584 | RTA00000177AF.h.20.1 |
| M00001349B:B08 | 3584 | 80.G2.sp6:130281.Seq |
| M00001350A:H01 | 7187 | 100.C2.sp6:131447.Seq |
| M00001350A:H01 | 7187 | 80.A3.sp6:130210.Seq |
| M00001350A:H01 | 7187 | RTA00000177AF.i.8.2 |
| M00001352A:E02 | 16245 | RTA00000177AF.k.9.3 |
| M00001352A:E02 | 16245 | 172.D2.sp6:133914.Seq |
| M00001352A:E02 | 16245 | 80.D3.sp6:130246.Seq |
| M00001355B:G10 | 14391 | RTA00000177AF.m.17.3 |
| M00001355B:G10 | 14391 | 80.G3.sp6:130282.Seq |
| M00001355B:G10 | 14391 | 172.H3.sp6:133963.Seq |
| M00001355B:G10 | 14391 | 100.E3.sp6:131472.Seq |
| M00001361D:F08 | 2379 | 80.C4.sp6:130235.Seq |
| M00001361D:F08 | 2379 | RTA00000178AF.a.6.1 |
| M00001365C:C10 | 40132 | RTA00000178AF.c.7.1 |
| M00001365C:C10 | 40132 | 80.F4.sp6:130271.Seq |
| M00001368D:E03 | | 80.G4.sp6:130283.Seq |
| M00001368D:E03 | | RTA00000178AF.d.20.1 |
| M00001370A:C09 | 6867 | 80.H4.sp6:130295.Seq |
| M00001370A:C09 | 6867 | RTA00000178AF.e.12.1 |
| M00001371C:E09 | 7172 | 100.A5.sp6:131426.Seq |
| M00001371C:E09 | 7172 | RTA00000178AF.f.9.1 |
| M00001371C:E09 | 7172 | 80.A5.sp6:130212.Seq |
| M00001378B:B02 | 39833 | 80.C5.sp6:130236.Seq |
| M00001378B:B02 | 39833 | RTA00000178AF.i.23.1 |
| M00001379A:A05 | 1334 | 80.D5.sp6:130248.Seq |
| M00001379A:A05 | 1334 | RTA00000178AF.j.7.1 |
| M00001380D:B09 | 39886 | RTA00000178AF.j.24.1 |
| M00001380D:B09 | 39886 | 80.E5.sp6:130260.Seq |
| M00001381D:E06 | | 80.F5.sp6:130272.Seq |
| M00001381D:E06 | | RTA00000178AF.k.16.1 |
| M00001382C:A02 | 22979 | 80.G5.sp6:130284.Seq |
| M00001382C:A02 | 22979 | RTA00000178AF.k.22.1 |
| M00001384B:A11 | | 80.B6.sp6:130225.Seq |
| M00001384B:A11 | | RTA00000178AF.m.13.1 |
| M00001386C:B12 | 5178 | 80.C6.sp6:130237.Seq |
| M00001386C:B12 | 5178 | RTA00000178AF.n.10.1 |
| M00001387B:G03 | 7587 | 80.E6.sp6:130261.Seq |
| M00001387B:G03 | 7587 | RTA00000178AF.n.24.1 |
| M00001389A:C08 | 16269 | RTA00000178AF.p.1.1 |
| M00001389A:C08 | 16269 | 80.G6.sp6:130285.Seq |
| M00001396A:C03 | 4009 | 172.D8.sp6:133920.Seq |
| M00001396A:C03 | 4009 | 80.A7.sp6:130214.Seq |
| M00001396A:C03 | 4009 | RTA00000179AF.e.20.1 |
| M00001400B:H06 | | 172.B9.sp6:133897.Seq |
| M00001400B:H06 | | 80.B7.sp6:130226.Seq |
| M00001400B:H06 | | RTA00000179AF.j.13.1 |
| M00001400B:H06 | | RTA00000179AF.j.13.1.Seq_THC105720 |
| M00001402A:E08 | 39563 | 80.C7.sp6:130238.Seq |
| M00001402A:E08 | 39563 | RTA00000179AF.k.20.1 |
| M00001407B:D11 | 5556 | RTA00000179AF.n.10.1 |
| M00001407B:D11 | 5556 | 80.D7.sp6:130250.Seq |
| M00001410A:D07 | 7005 | 180.H5.sp6:136003.Seq |
| M00001410A:D07 | 7005 | RTA00000179AF.o.22.1 |
| M00001410A:D07 | 7005 | 80.F7.sp6:130274.Seq |
| M00001414A:B01 | | RTA00000180AF.a.9.1 |
| M00001414A:B01 | | 80.H7.sp6:130298.Seq |
| M00001414C:A07 | | 80.A8.sp6:130215.Seq |
| M00001414C:A07 | | RTA00000180AF.a.11.1 |
| M00001416A:H01 | 7674 | 79.C1.sp6:130040.Seq |
| M00001416A:H01 | 7674 | RTA00000118A.g.9.1 |
| M00001417A:E02 | 36393 | RTA00000180AF.c.2.1 |
| M00001417A:E02 | 36393 | 80.D8.sp6:130251.Seq |
| M00001423B:E07 | 15066 | RTA00000180AF.e.24.1 |
| M00001423B:E07 | 15066 | 80.H8.sp6:130299.Seq |
| M00001424B:G09 | 10470 | 80.A9.sp6:130216.Seq |
| M00001424B:G09 | 10470 | RTA00000180AF.f.18.1 |
| M00001425B:H08 | 22195 | RTA00000180AF.g.7.1 |
| M00001425B:H08 | 22195 | 80.B9.sp6:130228.Seq |
| M00001426B:D12 | | RTA00000180AF.g.22.1 |
| M00001426B:D12 | | 80.C9.sp6:130240.Seq |
| M00001426D:C08 | 4261 | 80.D9.sp6:130252.Seq |
| M00001426D:C08 | 4261 | RTA00000180AF.h.5.1 |
| M00001428A:H10 | 84182 | 100.G9.sp6:131502.Seq |
| M00001428A:H10 | 84182 | RTA00000180AF.h.19.1 |
| M00001428A:H10 | 84182 | 80.E9.sp6:130264.Seq |
| M00001449A:A12 | 5857 | 80.B11.sp6:130230.Seq |
| M00001449A:A12 | 5857 | RTA00000118A.g.14.1 |
| M00001449A:B12 | 41633 | 80.C11.sp6:130242.Seq |
| M00001449A:B12 | 41633 | RTA00000118A.g.16.1 |
| M00001449A:G10 | 36535 | RTA00000181AF.f.5.1 |
| M00001449A:G10 | 36535 | 80.D11.sp6:130254.Seq |
| M00001449A:G10 | 36535 | 100.D11.sp6:131468.Seq |
| M00001449C:D06 | 86110 | RTA00000181AF.f.12.1 |
| M00001449C:D06 | 86110 | 80.E11.sp6:130266.Seq |
| M00001450A:A02 | 39304 | RTA00000118A.j.21.1.Seq_THC151859 |
| M00001450A:A02 | 39304 | RTA00000118A.j.21.1 |
| M00001450A:A02 | 39304 | 79.F1.sp6:130076.Seq |
| M00001450A:A02 | 39304 | 180.G9.sp6:135995.Seq |
| M00001450A:A11 | 32663 | 80.F11.sp6:130278.Seq |
| M00001450A:A11 | 32663 | RTA00000118A.l.8.1 |
| M00001450A:B12 | 82498 | 100.F11.sp6:131492.Seq |
| M00001450A:B12 | 82498 | RTA00000118A.m.10.1 |
| M00001450A:B12 | 82498 | 79.G1.sp6:130088.Seq |
| M00001450A:D08 | 27250 | 80.G11.sp6:130290.Seq |
| M00001450A:D08 | 27250 | 180.B10.sp6:135936.Seq |
| M00001450A:D08 | 27250 | RTA00000181AF.g.10.1 |
| M00001452A:B04 | 84328 | RTA00000118A.p.10.1 |
| M00001452A:B04 | 84328 | 79.A2.sp6:130017.Seq |
| M00001452A:B12 | 86859 | RTA00000118A.p.8.1 |
| M00001452A:B12 | 86859 | 79.B2.sp6:130029.Seq |
| M00001452A:F05 | 85064 | RTA00000131A.m.23.1 |
| M00001452A:F05 | 85064 | 79.D2.sp6:130053.Seq |
| M00001452C:B06 | 16970 | 80.H11.sp6:130302.Seq |
| M00001452C:B06 | 16970 | 100.C12.sp6:131457.Seq |
| M00001452C:B06 | 16970 | RTA00000181AR.i.18.2 |
| M00001453A:E11 | 16130 | 80.A12.sp6:130219.Seq |
| M00001453A:E11 | 16130 | 100.D12.sp6:131469.Seq |
| M00001453A:E11 | 16130 | RTA00000119A.c.13.1 |
| M00001453C:F06 | 16653 | 80.B12.sp6:130231.Seq |
| M00001453C:F06 | 16653 | RTA00000181AF.k.5.3 |
| M00001454A:A09 | 83103 | RTA00000119A.e.24.2 |
| M00001454A:A09 | 83103 | 79.G2.sp6:130089.Seq |
| M00001454B:C12 | 7005 | 121.D1.sp6:131917.Seq |
| M00001454B:C12 | 7005 | RTA00000181AF.k.24.1 |
| M00001454B:C12 | 7005 | 80.C12.sp6:130243.Seq |
| M00001455B:E12 | 13072 | 80.F12.sp6:130279.Seq |
| M00001455B:E12 | 13072 | RTA00000181AR.m.5.2 |
| M00001460A:F06 | 2448 | 89.A1.sp6:130667.Seq |
| M00001460A:F06 | 2448 | RTA00000119A.j.21.1 |
| M00001461A:D06 | 1531 | 89.C1.sp6:130691.Seq |
| M00001461A:D06 | 1531 | RTA00000119A.o.3.1 |
| M00001465A:B11 | 10145 | 79.F3.sp6:130078.Seq |
| M00001465A:B11 | 10145 | RTA00000120A.g.12.1 |
| M00001467A:B07 | 38759 | 89.F1.sp6:130727.Seq |
| M00001467A:B07 | 38759 | RTA00000120A.m.12.3 |
| M00001467A:D04 | 39508 | RTA00000120A.o.2.1 |
| M00001467A:D04 | 39508 | 89.G1.sp6:130739.Seq |
| M00001467A:E10 | 39442 | 89.A2.sp6:130668.Seq |
| M00001467A:E10 | 39442 | RTA00000120A.o.21.1 |
| M00001468A:F05 | 7589 | RTA00000120A.p.23.1 |
| M00001468A:F05 | 7589 | 89.B2.sp6:130680.Seq |
| M00001469A:A01 | | RTA00000121A.c.10.1 |
| M00001469A:A01 | | 89.C2.sp6:130692.Seq |
| M00001469A:C10 | 12081 | 89.D2.sp6:130704.Seq |
| M00001469A:C10 | 12081 | RTA00000133A.d.14.2 |
| M00001469A:H12 | 19105 | 89.E2.sp6:130716.Seq |
| M00001469A:H12 | 19105 | RTA00000133A.e.15.1 |
| M00001470A:C04 | 39425 | 89.G2.sp6:130740.Seq |
| M00001470A:C04 | 39425 | RTA00000133A.f.1.1 |
| M00001471A:B01 | 39478 | 89.H2.sp6:130752.Seq |
| M00001471A:B01 | 39478 | RTA00000133A.i.5.1 |
| M00001487B:H06 | | RTA00000182AF.l.15.1 |
| M00001487B:H06 | | 89.B3.sp6:130681.Seq |
| M00001488B:F12 | | RTA00000182AF.l.20.1 |
| M00001488B:F12 | | 89.C3.sp6:130693.Seq |
| M00001494D:F06 | 7206 | RTA00000182AF.o.15.1 |
| M00001494D:F06 | 7206 | 89.E3.sp6:130717.Seq |
| M00001499B:A11 | 10539 | RTA00000183AF.a.24.1 |
| M00001499B:A11 | 10539 | 89.G3.sp6:130741.Seq |
| M00001499B:A11 | 10539 | 173.B5.SP6:134085.Seq |
| M00001500A:C05 | 5336 | RTA00000183AF.b.13.1 |
| M00001500A:C05 | 5336 | 89.H3.sp6:130753.Seq |
| M00001504A:E01 | | RTA00000183AF.c.24.1 |
| M00001504A:E01 | | 89.D4.sp6:130706.Seq |
| M00001504A:E01 | | RTA00000183AF.c.24.1.Seq_THC125912 |
| M00001504C:A07 | 10185 | RTA00000183AF.d.5.1 |
| M00001504C:A07 | 10185 | 89.E4.sp6:130718.Seq |
| M00001505C:C05 | | 89.H4.sp6:130754.Seq |
| M00001505C:C05 | | RTA00000183AFe.1.1 |
| M00001506D:A09 | | 89.A5.sp6:130671.Seq |
| M00001506D:A09 | | RTA00000183AF.e.23.1 |
| M00001506D:A09 | | 121.G6.sp6:131958.Seq |
| M00001507A:H05 | 39168 | RTA00000121A.l.10.1 |
| M00001507A:H05 | 39168 | 89.B5.sp6:130683.Seq |
| M00001535A:F10 | 39423 | 79.C5.sp6:130044.Seq |
| M00001535A:F10 | 39423 | RTA00000134A.k.22.1 |
| M00001541A:H03 | 39174 | 79.E5.sp6:130068.Seq |
| M00001541A:H03 | 39174 | RTA00000124A.n.13.1 |
| M00001544A:G02 | 19829 | 79.H5.sp6:130104.Seq |
| M00001544A:G02 | 19829 | RTA00000125A.h.24.4 |
| M00001545A:D08 | 13864 | RTA00000125A.m.9.1 |
| M00001545A:D08 | 13864 | 79.B6.sp6:130033.Seq |
| M00001551A:F05 | 39180 | RTA00000126A.n.8.2 |
| M00001551A:F05 | 39180 | 79.A7.sp6:130022.Seq |
| M00001552A:D11 | 39458 | RTA00000126A.p.15.2 |
| M00001552A:D11 | 39458 | 79.D7.sp6:130058.Seq |
| M00001557A:F03 | 39490 | RTA00000128A.b.4.1 |
| M00001511A:H06 | 39412 | RTA00000133A.k.17.1 |
| M00001511A:H06 | 39412 | 89.C5.sp6:130695.Seq |
| M00001512A:A09 | 39186 | 89.D5.sp6:130707.Seq |
| M00001512A:A09 | 39186 | RTA00000121A.p.15.1 |
| M00001512D:G09 | 3956 | 89.E5.sp6:130719.Seq |
| M00001512D:G09 | 3956 | 173.H5.SP6:134157.Seq |
| M00001512D:G09 | 3956 | RTA00000183AF.g.3.1 |
| M00001513B:G03 | | RTA00000183AF.g.9.1 |
| M00001513B:G03 | | 89.F5.sp6:130731.Seq |
| M00001513B:G03 | | RTA00000183AF.g.9.1.Seq_THC198280 |
| M00001513C:E08 | 14364 | RTA00000183AF.g.12.1 |
| M00001513C:E08 | 14364 | 89.G5.sp6:130743.Seq |
| M00001514C:D11 | 40044 | RTA00000183AF.g.22.1 |
| M00001514C:D11 | 40044 | RTA00000183AF.g.22.1.Seq_THC232899 |
| M00001514C:D11 | 40044 | 89.H5.sp6:130755.Seq |
| M00001518C:B11 | 8952 | 89.A6.sp6:130672.Seq |
| M00001518C:B11 | 8952 | RTA00000183AF.h.15.1 |
| M00001528B:H04 | 8358 | 89.D6.sp6:130708.Seq |
| M00001528B:H04 | 8358 | RTA00000183AF.i.5.1 |
| M00001531A:D01 | 38085 | RTA00000123A.e.15.1 |
| M00001531A:D01 | 38085 | 89.E6.sp6:130720.Seq |
| M00001534A:C04 | 16921 | RTA00000183AF.k.6.1 |
| M00001534A:C04 | 16921 | 89.H6.sp6:130756.Seq |
| M00001534A:D09 | 5097 | RTA00000134A.k.1.1 |
| M00001534A:D09 | 5097 | RTA00000134A.k.1.1.Seq_THC215869 |
| M00001534C:A01 | 4119 | RTA00000183AF.k.16.1 |
| M00001534C:A01 | 4119 | 89.C7.sp6:130697.Seq |
| M00001535A:C06 | 20212 | 89.E7.sp6:130721.Seq |
| M00001535A:C06 | 20212 | RTA00000134A.l.22.1.Seq_THC128232 |
| M00001535A:C06 | 20212 | RTA00000134A.l.22.1 |
| M00001536A:B07 | 2696 | RTA00000134A.m.13.1 |
| M00001536A:B07 | 2696 | 89.F7.sp6:130733.Seq |
| M00001537A:F12 | 39420 | 89.H7.sp6:130757.Seq |
| M00001537A:F12 | 39420 | RTA00000134A.o.23.1 |
| M00001540A:D06 | 8286 | 89.B8.sp6:130686.Seq |
| M00001540A:D06 | 8286 | RTA00000183AF.o.1.1 |
| M00001542A:E06 | 39453 | 89.E8.sp6:130722.Seq |
| M00001542A:E06 | 39453 | RTA00000135A.g.11.1 |
| M00001544A:E06 | | RTA00000184AF.a.8.1 |
| M00001544A:E06 | | 173.G7.SP6:134147.Seq |
| M00001544A:E06 | | 89.H8.sp6:130758.Seq |
| M00001545A:B02 | | 89.B9.sp6:130687.Seq |
| M00001545A:B02 | | RTA00000135A.l.2.2 |
| M00001548A:E10 | 5892 | 89.E9.sp6:130723.Seq |
| M00001548A:E10 | 5892 | RTA00000184AF.d.11.1 |
| M00001548A:E10 | 5892 | RTA00000184AF.d.11.1.Seq_THC161896 |
| M00001549C:E06 | 16347 | 89.H9.sp6:130759.Seq |
| M00001549C:E06 | 16347 | RTA00000184AF.e.15.1 |
| M00001550A:A03 | 7239 | 89.A10.sp6:130676.Seq |
| M00001550A:A03 | 7239 | RTA00000126A.m.4.2 |
| M00001550A:G01 | 5175 | RTA00000184AF.f.3.1 |
| M00001550A:G01 | 5175 | 89.B10.sp6:130688.Seq |
| M00001551A:G06 | 22390 | RTA00000136A.j.13.1 |
| M00001551A:G06 | 22390 | 89.C10.sp6:130700.Seq |
| M00001551C:G09 | 3266 | RTA00000184AR.g.1.1 |
| M00001551C:G09 | 3266 | 89.D10.sp6:130712.Seq |
| M00001553A:H06 | 8298 | RTA00000127A.d.19.1 |
| M00001553A:H06 | 8298 | 89.G10.sp6:130748.Seq |
| M00001553B:F12 | 4573 | 89.H10.sp6:130760.Seq |
| M00001553B:F12 | 4573 | RTA00000184AF.h.9.1 |
| M00001555A:B02 | 39539 | RTA00000127A.i.21.1 |
| M00001555A:B02 | 39539 | 89.B11.sp6:130689.Seq |
| M00001555A:C01 | 39195 | 89.C11.sp6:130701.Seq |
| M00001555A:C01 | 39195 | RTA00000137A.c.16.1 |
| M00001555D:G10 | 4561 | RTA00000184AF.i.21.1 |
| M00001555D:G10 | 4561 | 89.D11.sp6:130713.Seq |
| M00001556A:C09 | 9244 | 89.E11.sp6:130725.Seq |
| M00001556A:C09 | 9244 | RTA00000127A.l.3.1 |
| M00001556B:G02 | 11294 | RTA00000184AF.j.6.1 |
| M00001556B:G02 | 11294 | 89.A12.sp6:130678.Seq |
| M00001557B:H10 | 5192 | 173.E9.SP6:134125.Seq |
| M00001557B:H10 | 5192 | RTA00000184AF.k.2.1 |
| M00001557B:H10 | 5192 | 89.D12.sp6:130714.Seq |
| M00001557D:D09 | 8761 | RTA00000184AF.k.12.1 |
| M00001557D:D09 | 8761 | 89.E12.sp6:130726.Seq |
| M00001558B:H11 | 7514 | RTA00000184AF.k.21.1 |
| M00001558B:H11 | 7514 | 89.G12.sp6:130750.Seq |
| M00001559B:F01 | | 89.H12.sp6:130762.Seq |
| M00001559B:F01 | | RTA00000184AF.l.11.1 |
| M00001560D:F10 | 6558 | 90.A1.sp6:130859.Seq |
| M00001560D:F10 | 6558 | RTA00000184AF.m.21.1 |
| M00001566B:D11 | | RTA00000184AF.p.3.1 |
| M00001566B:D11 | | 90.D1.sp6:130895.Seq |
| M00001583D:A10 | 6293 | RTA00000185AF.e.11.1 |
| M00001583D:A10 | 6293 | 90.A2.sp6:130860.Seq |
| M00001590B:F03 | | RTA00000185AF.g.11.1 |
| M00001590B:F03 | | 90.C2.sp6:130884.Seq |
| M00001597D:C05 | 10470 | RTA00000185AF.k.6.1 |
| M00001597D:C05 | 10470 | 90.F2.sp6:130920.Seq |
| M00001598A:G03 | 16999 | 90.G2.sp6:130932.Seq |
| M00001598A:G03 | 16999 | RTA00000185AF.k.9.1 |
| M00001601A:D08 | 22794 | RTA00000138A.b.5.1 |
| M00001601A:D08 | 22794 | 90.H2.sp6:130944.Seq |
| M00001607A:E11 | 11465 | RTA00000185AF.m.19.1 |
| M00001607A:E11 | 11465 | 90.A3.sp6:130861.Seq |
| M00001608A:B03 | 7802 | RTA00000185AF.n.5.1 |
| M00001608A:B03 | 7802 | 90.B3.sp6:130873.Seq |
| M00001608B:E03 | 22155 | RTA00000185AF.n.9.1 |
| M00001608B:E03 | 22155 | 90.C3.sp6:130885.Seq |
| M00001608D:A11 | | RTA00000185AF.n.12.1 |
| M00001608D:A11 | | 90.D3.sp6:130897.Seq |
| M00001614C:F10 | 13157 | RTA00000186AF.a.6.1 |
| M00001614C:F10 | 13157 | 90.E3.sp6:130909.Seq |
| M00001617C:E02 | 17004 | RTA00000186AF.b.21.1 |
| M00001617C:E02 | 17004 | 90.F3.sp6:130921.Seq |
| M00001619C:F12 | 40314 | 90.G3.sp6:130933.Seq |
| M00001619C:F12 | 40314 | RTA00000186AF.c.15.1 |
| M00001621C:C08 | 40044 | RTA00000186AF.d.1.1 |
| M00001621C:C08 | 40044 | RTA00000186AF.d.1.1.Seq_THC232899 |
| M00001621C:C08 | 40044 | 90.H3.sp6:130945.Seq |
| M00001621C:C08 | 40044 | 122.E1.sp6:132121.Seq |
| M00001623D:F10 | 13913 | RTA00000186AF.e.6.1 |
| M00001623D:F10 | 13913 | 90.A4.sp6:130862.Seq |
| M00001632D:H07 | | RTA00000186AF.h.14.1.Seq_THC112525 |
| M00001632D:H07 | | RTA00000186AF.h.14.1 |
| M00001632D:H07 | | 90.E4.sp6:130910.Seq |
| M00001632D:H07 | | 176.A3.sp6:134514.Seq |
| M00001644C:B07 | 39171 | RTA00000186AF.l.7.1 |
| M00001644C:B07 | 39171 | 90.F4.sp6:130922.Seq |
| M00001644C:B07 | 39171 | 217.A12.sp6:139369.Seq |
| M00001645A:C12 | 19267 | RTA00000186AF.l.12.1.Seq_THC178183 |
| M00001645A:C12 | 19267 | 176.G3.sp6:134586.Seq |
| M00001645A:C12 | 19267 | RTA00000186AF.l.12.1 |
| M00001645A:C12 | 19267 | 90.G4.sp6:130934.Seq |
| M00001648C:A01 | 4665 | 90.H4.sp6:130946.Seq |
| M00001648C:A01 | 4665 | RTA00000186AF.m.3.1 |
| M00001657D:C03 | 23201 | RTA00000187AF.a.14.1 |
| M00001657D:C03 | 23201 | 90.B5.sp6:130875.Seq |
| M00001657D:F08 | 76760 | 90.C5.sp6:130887.Seq |
| M00001657D:F08 | 76760 | RTA00000187AF.a.15.1 |
| M00001662C:A09 | 23218 | RTA00000187AR.c.5.2 |
| M00001662C:A09 | 23218 | 90.D5.sp6:130899.Seq |
| M00001663A:E04 | 35702 | 90.E5.sp6:130911.Seq |
| M00001663A:E04 | 35702 | RTA00000187AR.c.15.2 |
| M00001669B:F02 | 6468 | 90.F5.sp6:130923.Seq |
| M00001669B:F02 | 6468 | RTA00000187AF.d.15.1 |
| M00001670C:H02 | 14367 | 90.G5.sp6:130935.Seq |
| M00001670C:H02 | 14367 | RTA00000187AF.e.8.1 |
| M00001673C:H02 | 7015 | 90.H5.sp6:130947.Seq |
| M00001673C:H02 | 7015 | RTA00000187AF.f.18.1 |
| M00001675A:C09 | 8773 | RTA00000187AF.f.24.1 |
| M00001675A:C09 | 8773 | 90.A6.sp6:130864.Seq |
| M00001675A:C09 | 8773 | RTA00000187AF.f.24.1.Seq_THC220002 |
| M00001676B:F05 | 11460 | RTA00000187AF.g.12.1 |
| M00001676B:F05 | 11460 | 90.B6.sp6:130876.Seq |
| M00001676B:F05 | 11460 | 219.F2.sp6:139035.Seq |
| M00001677D:A07 | 7570 | 90.D6.sp6:130900.Seq |
| M00001677D:A07 | 7570 | RTA00000187AF.g.24.1 |
| M00001677D:A07 | 7570 | RTA00000187AF.g.24.1.Seq_THC168636 |
| M00001678D:F12 | 4416 | 90.E6.sp6:130912.Seq |
| M00001678D:F12 | 4416 | RTA00000187AF.h.13.1 |
| M00001679A:F10 | 26875 | RTA00000187AF.i.1.1 |
| M00001679A:F10 | 26875 | 90.A7.sp6:130865.Seq |
| M00001679B:F01 | 6298 | 90.B7.sp6:130877.Seq |
| M00001679B:F01 | 6298 | RTA00000187AR.i.10.2 |
| M00001680D:F08 | 10539 | 90.F7.sp6:130925.Seq |
| M00001680D:F08 | 10539 | 219.F6.sp6:139039.Seq |
| M00001680D:F08 | 10539 | RTA00000187AF.l.7.1 |
| M00001682C:B12 | 17055 | 90.G7.sp6:130937.Seq |
| M00001682C:B12 | 17055 | RTA00000187AF.m.3.1 |
| M00001682C:B12 | 17055 | 176.D6.sp6:134553.Seq |
| M00001688C:F09 | 5382 | 90.A8.sp6:130866.Seq |
| M00001688C:F09 | 5382 | RTA00000187AF.m.23.2 |
| M00001693C:G01 | 4393 | RTA00000187AF.n.17.1 |
| M00001693C:G01 | 4393 | 90.B8.sp6:130878.Seq |
| M00001716D:H05 | 67252 | RTA00000187AF.o.6.1 |
| M00001716D:H05 | 67252 | 90.C8.sp6:130890.Seq |
| M00003741D:C09 | 40108 | 90.D8.sp6:130902.Seq |
| M00003741D:C09 | 40108 | RTA00000187AF.o.24.1 |
| M00003747D:C05 | 11476 | RTA00000187AF.p.19.1 |
| M00003747D:C05 | 11476 | 90.E8.sp6:130914.Seq |
| M00003747D:C05 | 11476 | RTA00000187AF.p.19.1.Seq_THC108482 |
| M00003747D:C05 | 11476 | 219.H8.sp6:139065.Seq |
| M00003754C:E09 | | 90.F8.sp6:130926.Seq |
| M00003754C:E09 | | RTA00000188AF.b.12.1 |
| M00003761D:A09 | | RTA00000188AF.d.11.1 |
| M00003761D:A09 | | 90.H8.sp6:130950.Seq |
| M00003761D:A09 | | RTA00000188AF.d.11.1.Seq_THC212094 |
| M00003762C:B08 | 17076 | RTA00000188AF.d.21.1.Seq_THC208760 |
| M00003762C:B08 | 17076 | 90.A9.sp6:130867.Seq |
| M00003762C:B08 | 17076 | RTA00000188AF.d.21.1 |
| M00003763A:F06 | 3108 | RTA00000188AF.d.24.1 |
| M00003763A:F06 | 3108 | 90.B9.sp6:130879.Seq |
| M00003774C:A03 | 67907 | RTA00000188AF.g.11.1.Seq_THC123222 |
| M00003774C:A03 | 67907 | RTA00000188AF.g.11.1 |
| M00003774C:A03 | 67907 | 90.C9.sp6:130891.Seq |
| M00003784D:D12 | | RTA00000188AF.i.8.1 |
| M00003784D:D12 | | 90.D9.sp6:130903.Seq |
| M00003839A:D08 | 7798 | RTA00000189AF.c.18.1 |
| M00003839A:D08 | 7798 | 90.A10.sp6:130868.Seq |
| M00003851B:D08 | | 90.D10.sp6:130904.Seq |
| M00003851B:D08 | | RTA00000189AF.f.7.1 |
| M00003851B:D10 | 13595 | 90.E10.sp6:130916.Seq |
| M00003851B:D10 | 13595 | RTA00000189AF.f.8.1 |
| M00003853A:D04 | 5619 | 90.F10.sp6:130928.Seq |
| M00003853A:D04 | 5619 | RTA00000189AF.f.17.1 |
| M00003853A:F12 | 10515 | 90.G10.sp6:130940.Seq |
| M00003853A:F12 | 10515 | RTA00000189AF.f.18.1 |
| M00003856B:C02 | 4622 | 90.H10.sp6:130952.Seq |
| M00003856B:C02 | 4622 | RTA00000189AF.g.1.1 |
| M00003857A:H03 | 4718 | 90.B11.sp6:130881.Seq |
| M00003857A:H03 | 4718 | RTA00000189AF.g.5.1.Seq_THC196102 |
| M00003857A:H03 | 4718 | RTA00000189AF.g.5.1 |
| M00003867A:D10 | | 90.C11.sp6:130893.Seq |
| M00003867A:D10 | | RTA00000189AF.h.17.1 |
| M00003871C:E02 | 4573 | RTA00000189AF.j.12.1 |
| M00003875C:G07 | 8479 | 90.G11.sp6:130941.Seq |
| M00003875C:G07 | 8479 | RTA00000189AF.j.22.1 |
| M00003875D:D11 | | 90.H11.sp6:130953.Seq |
| M00003875D:D11 | | RTA00000189AF.j.23.1 |
| M00003876D:E12 | 7798 | 90.A12.sp6:130870.Seq |
| M00003876D:E12 | 7798 | RTA00000189AF.k.12.1 |
| M00003906C:E10 | 9285 | 90.H12.sp6:130954.Seq |
| M00003906C:E10 | 9285 | RTA00000190AF.d.7.1 |
| M00003907D:A09 | 39809 | 99.A1.sp6:131230.Seq |
| M00003907D:A09 | 39809 | RTA00000190AF.e.3.1.Seq_THC150217 |
| M00003907D:A09 | 39809 | RTA00000190AF.e.3.1 |
| M00003907D:H04 | 16317 | 99.B1.sp6:131242.Seq |
| M00003907D:H04 | 16317 | RTA00000190AF.e.6.1 |
| M00003909D:C03 | 8672 | RTA00000190AF.f.11.1 |
| M00003909D:C03 | 8672 | 99.C1.sp6:131254.Seq |
| M00003968B:F06 | 24488 | RTA00000190AF.n.16.1 |
| M00003968B:F06 | 24488 | 99.C2.sp6:131255.Seq |
| M00003970C:B09 | 40122 | RTA00000190AF.n.23.1 |
| M00003970C:B09 | 40122 | RTA00000190AF.n.23.1.Seq_THC109227 |
| M00003970C:B09 | 40122 | 99.D2.sp6:131267.Seq |
| M00003974D:E07 | 23210 | RTA00000190AF.o.20.1 |
| M00003974D:E07 | 23210 | RTA00000190AF.o.20.1.Seq_THC207240 |
| M00003974D:E07 | 23210 | 99.E2.sp6:131279.Seq |
| M00003974D:H02 | 23358 | RTA00000190AF.o.21.1.Seq_THC207240 |
| M00003974D:H02 | 23358 | RTA00000190AF.o.21.1 |
| M00003974D:H02 | 23358 | 99.F2.sp6:131291.Seq |
| M00003981A:E10 | 3430 | 99.A3.sp6:131232.Seq |
| M00003981A:E10 | 3430 | RTA00000191AF.a.9.1 |
| M00003982C:C02 | 2433 | RTA00000191AF.a.15.2 |
| M00003982C:C02 | 2433 | 99.B3.sp6:131244.Seq |
| M00003982C:C02 | 2433 | RTA00000191AF.a.15.2.Seq_THC79498 |
| M00004028D:C05 | 40073 | RTA00000191AF.e.3.1 |
| M00004028D:C05 | 40073 | 99.E3.sp6:131280.Seq |
| M00004035C:A07 | 37285 | 99.H3.sp6:131316.Seq |
| M00004035C:A07 | 37285 | RTA00000191AF.f.11.1 |
| M00004035D:B06 | 17036 | RTA00000191AF.f.13.1 |
| M00004035D:B06 | 17036 | 99.A4.sp6:131233.Seq |
| M00004072A:C03 | | RTA00000191AF.j.9.1 |
| M00004072A:C03 | | 99.D4.sp6:131269.Seq |
| M00004081C:D10 | 15069 | 99.F4.sp6:131293.Seq |
| M00004081C:D10 | 15069 | RTA00000191AF.l.6.1 |
| M00004086D:G06 | 9285 | 99.H4.sp6:131317.Seq |
| M00004086D:G06 | 9285 | RTA00000191AF.m.18.1 |
| M00004105C:A04 | 7221 | 99.D5.sp6:131270.Seq |
| M00004105C:A04 | 7221 | RTA00000191AF.p.9.1 |
| M00004171D:B03 | 4908 | RTA00000192AF.j.2.1 |
| M00004171D:B03 | 4908 | 99.F6.sp6:131295.Seq |
| M00004185C:C03 | 11443 | RTA00000192AF.l.13.2 |
| M00004185C:C03 | 11443 | 123.A8.sp6:132272.Seq |
| M00004185C:C03 | 11443 | 99.A7.sp6:131236.Seq |
| M00004191D:B11 | | RTA00000192AF.m.12.1 |
| M00004191D:B11 | | 99.B7.sp6:131248.Seq |
| M00004191D:B11 | | 123.C8.sp6:132296.Seq |
| M00004197D:H01 | 8210 | 99.C7.sp6:131260.Seq |
| M00004197D:H01 | 8210 | 123.E8.sp6:132320.Seq |
| M00004197D:H01 | 8210 | RTA00000192AF.n.13.1 |
| M00004203B:C12 | 14311 | 99.D7.sp6:131272.Seq |
| M00004203B:C12 | 14311 | RTA00000192AF.o.2.1 |
| M00004214C:H05 | 11451 | 177.D8.sp6:134747.Seq |
| M00004214C:H05 | 11451 | RTA00000192AF.p.17.1 |
| M00004223D:E04 | 12971 | RTA00000193AF.a.20.1 |
| M00004223D:E04 | 12971 | 99.B8.sp6:131249.Seq |
| M00004269D:D06 | 4905 | 99.H8.sp6:131321.Seq |
| M00004269D:D06 | 4905 | RTA00000193AF.e.14.1 |
| M00004295D:F12 | 16921 | 99.D9.sp6:131274.Seq |
| M00004295D:F12 | 16921 | RTA00000193AF.h.15.1 |
| M00004296C:H07 | 13046 | 99.E9.sp6:131286.Seq |
| M00004296C:H07 | 13046 | RTA00000193AF.h.19.1 |
| M00004307C:A06 | 9457 | RTA00000193AF.i.14.2 |
| M00004307C:A06 | 9457 | 99.F9.sp6:131298.Seq |
| M00004307C:A06 | 9457 | 123.D11.sp6:132311.Seq |
| M00004312A:G03 | 26295 | RTA00000193AF.i.24.2 |
| M00004312A:G03 | 26295 | 99.G9.sp6:131310.Seq |
| M00004312A:G03 | 26295 | RTA00000193AF.i.24.2.Seq_THC197345 |
| M00004318C:D10 | 21847 | RTA00000193AF.j.9.1 |
| M00004318C:D10 | 21847 | 99.H9.sp6:131322.Seq |
| M00004359B:G02 | | RTA00000193AF.m.5.1.Seq_THC173318 |
| M00004359B:G02 | | RTA00000193AF.m.5.1 |
| M00004505D:F08 | | RTA00000194AF.b.19.1 |
| M00004505D:F08 | | 99.H10.sp6:131323.Seq |
| M00004692A:H08 | | 99.B11.sp6:131252.Seq |
| M00004692A:H08 | | RTA00000194AF.c.24.1 |
| M00004692A:H08 | | 377.F4.sp6:141957.Seq |
| M00005180C:G03 | | RTA00000194AF.f.4.1 |
| M00001346D:E03 | 6806 | RTA00000177AF.g.13.3 |
| M00001350A:B08 | | 80.H2.sp6:130293.Seq |
| M00001350A:B08 | | RTA00000177AF.i.6.2 |
| M00001357D:D11 | 4059 | RTA00000177AF.n.18.3.Seq_THC123051 |
| M00001357D:D11 | 4059 | RTA00000177AF.n.18.3 |
| M00001409C:D12 | 9577 | RTA00000179AF.o.17.1 |
| M00001409C:D12 | 9577 | 80.E7.sp6:130262.Seq |
| M00001418B:F03 | 9952 | RTA00000180AF.c.20.1 |
| M00001418B:F03 | 9952 | RTA00000180AF.c.20.1.Seq_THC162284 |
| M00001418B:F03 | 9952 | 80.E8.sp6:130263.Seq |
| M00001418D:B06 | 8526 | RTA00000180AF.d.1.1 |
| M00001421C:F01 | 9577 | RTA00000180AF.d.23.1 |
| M00001421C:F01 | 9577 | 80.G8.sp6:130287.Seq |
| M00001429B:A11 | 4635 | RTA00000180AF.i.20.1 |
| M00001432C:F06 | | RTA00000180AF.k.24.1 |
| M00001439C:F08 | 40054 | RTA00000180AF.p.10.1 |
| M00001442C:D07 | 16731 | RTA00000181AF.a.20.1 |
| M00001442C:D07 | 16731 | 80.C10.sp6:130241.Seq |
| M00001443B:F01 | | 80.D10.sp6:130253.Seq |
| M00001443B:F01 | | RTA00000181AF.b.7.1 |
| M00001445A:F05 | 13532 | 80.E10.sp6:130265.Seq |
| M00001445A:F05 | 13532 | RTA00000181AF.c.4.1 |
| M00001446A:F05 | 7801 | RTA00000181AF.c.21.1 |
| M00001455A:E09 | 13238 | RTA00000181AF.m.4.1 |
| M00001455A:E09 | 13238 | RTA00000181AF.m.4.1.Seq_THC140691 |
| M00001460A:F12 | 39498 | RTA00000119A.j.20.1 |
| M00001481D:A05 | 7985 | RTA00000182AR.j.2.1 |
| M00001490B:C04 | 18699 | RTA00000182AF.m.16.1 |
| M00001490B:C04 | 18699 | 89.D3.sp6:130705.Seq |
| M00001500C:E04 | 9443 | 89.B4.sp6:130682.Seq |
| M00001500C:E04 | 9443 | RTA00000183AF.c.1.1 |
| M00001532B:A06 | 3990 | 89.G6.sp6:130744.Seq |
| M00001532B:A06 | 3990 | RTA00000183AF.j.11.1 |
| M00001534A:F09 | 5321 | 89.B7.sp6:130685.Seq |
| M00001534A:F09 | 5321 | RTA00000183AF.k.8.1 |
| M00001535A:B01 | 7665 | RTA00000134A.l.19.1 |
| M00001536A:C08 | 39392 | 89.G7.sp6:130745.Seq |
| M00001536A:C08 | 39392 | RTA00000134A.m.16.1 |
| M00001541A:F07 | 22085 | RTA00000135A.e.5.2 |
| M00001542B:B01 | | RTA00000183AF.p.4.1 |
| M00001542B:B01 | | 89.F8.sp6:130734.Seq |
| M00001544A:E03 | 12170 | RTA00000125A.h.18.4 |
| M00001545A:C03 | 19255 | RTA00000135A.m.18.1 |
| M00001545A:C03 | 19255 | 184.B10.sp6:135547.Seq |
| M00001545A:C03 | 19255 | 89.C9.sp6:130699.Seq |
| M00001548A:H09 | 1058 | RTA00000126A.e.20.3.Seq_THC217534 |
| M00001548A:H09 | 1058 | RTA00000126A.e.20.3 |
| M00001548A:H09 | 1058 | 79.F6.sp6:130081.Seq |
| M00001549A:B02 | 4015 | RTA00000136A.e.12.1 |
| M00001549A:B02 | 4015 | 79.G6.sp6:130093.Seq |
| M00001549A:D08 | 10944 | RTA00000126A.h.17.2 |
| M00001552B:D04 | 5708 | RTA00000184AF.g.12.1 |
| M00001552B:D04 | 5708 | 89.E10.sp6:130724.Seq |
| M00001552D:A01 | | 89.F10.sp6:130736.Seq |
| M00001552D:A01 | | RTA00000184AF.g.22.1 |
| M00001553D:D10 | 22814 | RTA00000184AF.h.14.1 |
| M00001553D:D10 | 22814 | 89.A11.sp6:130677.Seq |
| M00001558A:H05 | | RTA00000128A.c.20.1 |
| M00001558A:H05 | | 89.F12.sp6:130738.Seq |
| M00001561A:C05 | 39486 | RTA00000128A.m.22.2 |
| M00001561A:C05 | 39486 | 79.B8.sp6:130035.Seq |
| M00001564A:B12 | 5053 | RTA00000184AF.o.12.1 |
| M00001578B:E04 | 23001 | RTA00000185AF.c.24.1 |
| M00001579D:C03 | 6539 | 90.G1.sp6:130931.Seq |
| M00001579D:C03 | 6539 | 173.A12.SP6:134080.Seq |
| M00001579D:C03 | 6539 | RTA00000185AF.d.11.1 |
| M00001582D:F05 | | RTA00000185AF.d.24.1 |
| M00001587A:B11 | 39380 | RTA00000129A.e.24.1 |
| M00001587A:B11 | 39380 | 79.E8.sp6:130071.Seq |
| M00001604A:F05 | 39391 | RTA00000138A.c.3.1 |
| M00001604A:F05 | 39391 | 79.A9.sp6:130024.Seq |
| M00001624A:B06 | 3277 | RTA00000138A.l.5.1 |
| M00001624A:B06 | 3277 | 217.E1.sp6:139406.Seq |
| M00001624A:B06 | 3277 | 90.B4.sp6:130874.Seq |
| M00001630B:H09 | 5214 | 90.D4.sp6:130898.Seq |
| M00001630B:H09 | 5214 | 122.C2.sp6:132098.Seq |
| M00001630B:H09 | 5214 | RTA00000186AF.g.11.1 |
| M00001651A:H01 | | RTA00000186AF.n.7.1 |
| M00001651A:H01 | | 90.A5.sp6:130863.Seq |
| M00001677C:E10 | 14627 | RTA00000187AF.g.23.1 |
| M00001679C:F01 | 78091 | 90.C7.sp6:130889.Seq |
| M00001679C:F01 | 78091 | RTA00000187AF.j.6.1 |
| M00001679C:F01 | 78091 | 176.G5.sp6:134588.Seq |
| M00001686A:E06 | 4622 | RTA00000187AF.m.15.2 |
| M00003796C:D05 | 5619 | RTA00000188AF.l.9.1.Seq_THC167845 |
| M00003796C:D05 | 5619 | RTA00000188AF.l.9.1 |
| M00003826B:A06 | 11350 | RTA00000189AF.a.24.2 |
| M00003826B:A06 | 11350 | 90.F9.sp6:130927.Seq |
| M00003833A:E05 | 21877 | RTA00000189AF.b.21.1 |
| M00003837D:A01 | 7899 | 90.H9.sp6:130951.Seq |
| M00003837D:A01 | 7899 | RTA00000189AF.c.10.1 |
| M00003846B:D06 | 6874 | RTA00000189AF.e.9.1 |
| M00003846B:D06 | 6874 | 90.C10.sp6:130892.Seq |
| M00003879B:D10 | 31587 | RTA00000189AF.l.20.1 |
| M00003879B:D10 | 31587 | 90.C12.sp6:130894.Seq |
| M00003879D:A02 | 14507 | 90.D12.sp6:130906.Seq |
| M00003879D:A02 | 14507 | RTA00000189AR.l.23.2 |
| M00003891C:H09 | | 90.G12.sp6:130942.Seq |
| M00003891C:H09 | | RTA00000189AF.p.8.1 |
| M00003912B:D01 | 12532 | 99.D1.sp6:131266.Seq |
| M00003912B:D01 | 12532 | RTA00000190AF.g.2.1 |
| M00004072B:B05 | 17036 | RTA00000191AF.j.10.1 |
| M00004081C:D12 | 14391 | RTA00000191AF.l.7.1 |
| M00004111D:A08 | 6874 | RTA00000192AF.a.14.1 |
| M00004111D:A08 | 6874 | 99.F5.sp6:131294.Seq |
| M00004121B:G01 | | 177.H4.sp6:134791.Seq |
| M00004121B:G01 | | 99.H5.sp6:131318.Seq |
| M00004121B:G01 | | RTA00000192AF.c.2.1 |
| M00004138B:H02 | 13272 | 99.A6.sp6:131235.Seq |
| M00004138B:H02 | 13272 | RTA00000192AF.e.3.1 |
| M00004151D:B08 | 16977 | RTA00000192AF.g.3.1 |
| M00004169C:C12 | 5319 | 99.E6.sp6:131283.Seq |
| M00004169C:C12 | 5319 | RTA00000192AF.i.12.1 |
| M00004169C:C12 | 5319 | 123.F7.sp6:132331.Seq |
| M00004183C:D07 | 16392 | RTA00000192AF.l.1.1 |
| M00004183C:D07 | 16392 | RTA00000192AF.l.1.1.Seq_THC202071 |
| M00004230B:C07 | 7212 | RTA00000193AF.b.14.1 |
| M00004230B:C07 | 7212 | 99.D8.sp6:131273.Seq |
| M00004249D:F10 | | RTA00000193AF.c.21.1.Seq_THC222602 |
| M00004249D:F10 | | RTA00000193AF.c.21.1 |
| M00004275C:C11 | 16914 | 99.A9.sp6:131238.Seq |
| M00004275C:C11 | 16914 | RTA00000193AF.f.5.1 |
| M00004283B:A04 | 14286 | RTA00000193AF.f.22.1 |
| M00004285B:E08 | 56020 | RTA00000193AF.g.2.1 |
| M00004327B:H04 | | RTA00000193AF.j.20.1 |
| M00004377C:F05 | 2102 | RTA00000193AF.n.7.1 |
| M00004384C:D02 | | RTA00000193AF.n.15.1 |
| M00004384C:D02 | | RTA00000193AF.n.15.1.Seq_THC215687 |
| M00004461A:B08 | | RTA00000194AR.a.10.2 |
| M00004461A:B09 | | RTA00000194AF.a.11.1 |
| M00004691D:A05 | | RTA00000194AF.c.23.1 |
| M00004896A:C07 | | RTA00000194AF.d.13.1 |

[0477] The above material has been deposited with the American Type Culture Collection, Rockville, Md., under the accession number indicated. This deposit will be maintained under the terms of the Budapest Treaty on the International Recognition of the Deposit of Microorganisms for purposes of Patent Procedure. The deposit will be maintained for a period of 30 years following issuance of this patent, or for the enforceable life of the patent, whichever is greater. Upon issuance of the patent, the deposit will be available to the public from the ATCC without restriction.

[0478] This deposit is provided merely as convenience to those of skill in the art, and is not an admission that a deposit is required under 35 U.S.C. §112. The sequence of the polynucleotides contained within the deposited material, as well as the amino acid sequence of the polypeptides encoded thereby, are incorporated herein by reference and are controlling in the event of any conflict with the written description of sequences herein. A license may be required to make, use, or sell the deposited material, and no such license is granted hereby.

[0479] Retrieval of Individual Clones from Deposit of Pooled Clones

[0480] Where the ATCC deposit is composed of a pool of cDNA clones, the deposit was prepared by first transfecting each of the clones into separate bacterial cells. The clones were then deposited as a pool of equal mixtures in the composite deposit. Particular clones can be obtained from the composite deposit using methods well known in the art. For example, a bacterial cell containing a particular clone can be identified by isolating single colonies, and identifying colonies containing the specific clone through standard colony hybridization techniques, using an oligonucleotide probe or probes designed to specifically hybridize to a sequence of the clone insert (e.g., a probe based upon unmasked sequence of the encoded polynucleotide having the indicated SEQ ID NO). The probe should be designed to have a Tₘ of approximately 80° C. (assuming 2° C. for each A or T and 4° C. for each G or C). Positive colonies can then be picked, grown in culture, and the recombinant clone isolated. Alternatively, probes designed in this manner can be used to PCR to isolate a nucleic acid molecule from the pooled clones according to methods well known in the art, e.g., by purifying the cDNA from the deposited culture pool, and using the probes in PCR reactions to produce an amplified product having the corresponding desired polynucleotide sequence.

TABLE 1
Sequence identification numbers, cluster ID, sequence name, and clone name

| SEQ ID NO: | Cluster ID | Sequence Name | Clone Name |
|---|---|---|---|
| 1 | 4635 | RTA00000180AF.i.20.1 | M00001429B:A11 |
| 2 | | RTA00000185AF.n.12.1 | M00001608D:A11 |
| 3 | 4622 | RTA00000187AF.m.15.2 | M00001686A:E06 |
| 4 | 3706 | RTA00000191AF.i.17.2 | M00004068B:A01 |
| 5 | 36535 | RTA00000181AF.f.5.1 | M00001449A:G10 |
| 6 | 3990 | RTA00000183AF.j.11.1 | M00001532B:A06 |
| 7 | 5319 | RTA00000192AF.i.12.1 | M00004169C:C12 |
| 8 | 36393 | RTA00000180AF.c.2.1 | M00001417A:E02 |
| 9 | 2623 | RTA00000183AF.a.6.1 | M00001497A:G02 |
| 10 | 7587 | RTA00000178AF.n.24.1 | M00001387B:G03 |
| 11 | 7065 | RTA00000137A.g.6.1 | M00001557A:D02 |
| 12 | 10539 | RTA00000187AF.l.7.1 | M00001680D:F08 |
| 13 | 27250 | RTA00000181AF.g.10.1 | M00001450A:D08 |
| 14 | 5556 | RTA00000179AF.n.10.1 | M00001407B:D11 |
| 15 | | RTA00000192AF.m.12.1 | M00004191D:B11 |
| 16 | 8761 | RTA00000184AF.k.12.1 | M00001557D:D09 |
| 17 | 4622 | RTA00000189AF.g.1.1 | M00003856B:C02 |
| 18 | 11460 | RTA00000187AF.g.12.1 | M00001676B:F05 |
| 19 | 16283 | RTA00000120A.o.20.1 | M00001467A:D08 |
| 20 | 3430 | RTA00000191AF.a.9.1 | M00003981A:E10 |
| 21 | 7065 | RTA00000184AF.j.21.1 | M00001557A:D02 |
| 22 | | RTA00000182AF.l.20.1 | M00001488B:F12 |
| 23 | | RTA00000123A.g.19.1 | M00001531A:H11 |
| 24 | 16918 | RTA00000193AF.a.16.1 | M00004223A:G10 |
| 25 | 16914 | RTA00000193AF.f.5.1 | M00004275C:C11 |
| 26 | 40108 | RTA00000187AF.o.24.1 | M00003741D:C09 |
| 27 | 14286 | RTA00000193AF.f.22.1 | M00004283B:A04 |
| 28 | 17004 | RTA00000186AF.b.21.1 | M00001617C:E02 |
| 29 | | RTA00000180AF.g.22.1 | M00001426B:D12 |
| 30 | 13272 | RTA00000192AF.e.3.1 | M00004138B:H02 |
| 31 | | RTA00000194AF.f.4.1 | M00005180C:G03 |
| 32 | 32663 | RTA00000118A.l.8.1 | M00001450A:A11 |
| 33 | | RTA00000180AF.a.9.1 | M00001414A:B01 |
| 34 | 5832 | RTA00000178AF.o.23.1 | M00001388D:G05 |
| 35 | 7801 | RTA00000181AF.c.21.1 | M00001446A:F05 |
| 36 | 76760 | RTA00000187AF.a.15.1 | M00001657D:F08 |
| 37 | 40132 | RTA00000178AF.c.7.1 | M00001365C:C10 |
| 38 | | RTA00000183AF.e.1.1 | M00001505C:C05 |
| 39 | 4016 | RTA00000118A.c.4.1 | M00001395A:C03 |
| 40 | 5382 | RTA00000187AF.m.23.2 | M00001688C:F09 |
| 41 | 5693 | RTA00000190AF.p.17.2 | M00003978B:G05 |
| 42 | 307 | RTA00000136A.o.4.2 | M00001552A:B12 |
| 43 | 39833 | RTA00000178AF.i.23.1 | M00001378B:B02 |
| 44 | | RTA00000193AF.m.5.1 | M00004359B:G02 |
| 45 | 5325 | RTA00000191AF.o.6.1 | M00004093D:B12 |
| 46 | 5325 | RTA00000191AF.o.6.2 | M00004093D:B12 |
| 47 | 18957 | RTA00000190AR.m.9.1 | M00003958A:H02 |
| 48 | 39508 | RTA00000120A.o.2.1 | M00001467A:D04 |
| 49 | 22390 | RTA00000136A.j.13.1 | M00001551A:G06 |
| 50 | 12170 | RTA00000125A.h.18.4 | M00001544A:E03 |
| 51 | 4393 | RTA00000187AF.n.17.1 | M00001693C:G01 |
| 52 | 19 | RTA00000182AF.b.7.1 | M00001463C:B11 |
| 53 | | RTA00000193AF.c.21.1 | M00004249D:F10 |
| 54 | 7899 | RTA00000189AF.c.10.1 | M00003837D:A01 |
| 55 | 40073 | RTA00000191AF.e.3.1 | M00004028D:C05 |
| 56 | 7005 | RTA00000179AF.o.22.1 | M00001410A:D07 |
| 57 | | RTA00000187AF.h.22.1 | M00001679A:F06 |
| 58 | 18957 | RTA00000190AF.m.9.2 | M00003958A:H02 |
| 59 | 18957 | RTA00000183AF.h.23.1 | M00001528A:F09 |
| 60 | 16283 | RTA00000182AF.c.22.1 | M00001467A:D08 |
| 61 | 6974 | RTA00000183AF.d.9.1 | M00001504C:H06 |
| 62 | 2623 | RTA00000183AF.b.14.1 | M00001500A:E11 |
| 63 | 9105 | RTA00000191AF.a.21.2 | M00003983A:A05 |
| 64 | 13238 | RTA00000181AF.m.4.1 | M00001455A:E09 |
| 65 | 5749 | RTA00000185AF.a.19.1 | M00001571C:H06 |
| 66 | 6455 | RTA00000193AF.b.9.1 | M00004229B:F08 |
| 67 | 23001 | RTA00000185AF.c.24.1 | M00001578B:E04 |
| 68 | 6455 | RTA00000192AF.g.23.1 | M00004157C:A09 |
| 69 | 13595 | RTA00000189AF.f.8.1 | M00003851B:D10 |
| 70 | 39442 | RTA00000120A.o.21.1 | M00001467A:E10 |
| 71 | 17036 | RTA00000191AF.f.13.1 | M00004035D:B06 |
| 72 | | RTA00000183AF.g.9.1 | M00001513B:G03 |
| 73 | 7005 | RTA00000181AF.k.24.1 | M00001454B:C12 |
| 74 | 6268 | RTA00000126A.o.23.1 | M00001551A:B10 |
| 75 | 16130 | RTA00000119A.c.13.1 | M00001453A:E11 |
| 76 | 23201 | RTA00000187AF.a.14.1 | M00001657D:C03 |
| 77 | 5321 | RTA00000183AF.k.8.1 | M00001534A:F09 |
| 78 | 13157 | RTA00000186AF.a.6.1 | M00001614C:F10 |
| 79 | 2102 | RTA00000193AF.n.7.1 | M00004377C:F05 |
| 80 | 1058 | RTA00000126A.e.20.3 | M00001548A:H09 |
| 81 | 40392 | RTA00000180AF.j.8.1 | M00001429D:D07 |
| 82 | | RTA00000183AF.e.23.1 | M00001506D:A09 |
| 83 | 11476 | RTA00000187AF.p.19.1 | M00003747D:C05 |
| 84 | 3584 | RTA00000177AF.h.20.1 | M00001349B:B08 |
| 85 | 10470 | RTA00000180AF.f.18.1 | M00001424B:G09 |
| 86 | 39425 | RTA00000133A.f.1.1 | M00001470A:C04 |
| 87 | 5175 | RTA00000184AF.f.3.1 | M00001550A:G01 |
| 88 | 13576 | RTA00000189AF.o.13.1 | M00003885C:A02 |
| 89 | 7665 | RTA00000134A.l.19.1 | M00001535A:B01 |
| 90 | 16927 | RTA00000177AF.h.9.3 | M00001348B:B04 |
| 91 | 6660 | RTA00000187AF.h.15.1 | M00001679A:A06 |
| 92 | 2433 | RTA00000191AF.a.15.2 | M00003982C:C02 |
| 93 | 5097 | RTA00000134A.k.1.1 | M00001534A:D09 |
| 94 | 21847 | RTA00000193AF.j.9.1 | M00004318C:D10 |
| 95 | 3277 | RTA00000138A.l.5.1 | M00001624A:806 |
| 96 | 5708 | RTA00000184AF.g.12.1 | M00001552B:D04 |
| 97 | 945 | RTA00000178AR.a.20.1 | M00001362C:H11 |
| 98 | 16269 | RTA00000178AF.p.1.1 | M00001389A:C08 |
| 99 | | RTA00000183AF.c.24.1 | M00001504A:E01 |
| 100 | 16731 | RTA00000181AF.a.20.1 | M00001442C:D07 |
| 101 | 12439 | RTA00000190AF.o.24.1 | M00003975A:G11 |
| 102 | 3162 | RTA00000177AF.j.12.3 | M00001351B:A08 |
| 103 | | RTA00000194AF.b.19.1 | M00004505D:F08 |
| 104 | | RTA00000193AF.n.15.1 | M00004384C:D02 |
| 105 | | RTA00000186AF.n.7.1 | M00001651A:H01 |
| 106 | 10717 | RTA00000181AF.d.10.1 | M00001447A:G03 |
| 107 | 4573 | RTA00000189AF.j.12.1 | M00003871C:E02 |
| 108 | | RTA00000186AF.h.14.1 | M00001632D:H07 |
| 109 | 11443 | RTA00000192AF.l.13.2 | M00004185C:C03 |
| 110 | 5892 | RTA00000184AF.d.11.1 | M00001548A:E10 |
| 111 | 3162 | RTA00000177AF.j.12.1 | M00001351B:A08 |
| 112 | 10470 | RTA00000185AF.k.6.1 | M00001597D:C05 |
| 113 | 17055 | RTA00000187AF.m.3.1 | M00001682C:B12 |
| 114 | 2030 | RTA00000193AF.m.20.1 | M00004372A:A03 |
| 115 | 6558 | RTA00000184AF.m.21.1 | M00001560D:F10 |
| 116 | 23255 | RTA00000190AF.j.4.1 | M00003922A:E06 |
| 117 | 9577 | RTA00000179AF.o.17.1 | M00001409C:D12 |
| 118 | | RTA00000180AF.a.11.1 | M00001414C:A07 |
| 119 | 8 | RTA00000181AF.e.17.1 | M00001448D:C09 |
| 120 | 67907 | RTA00000188AF.g.11.1 | M00003774C:A03 |
| 121 | 12081 | RTA00000133A.d.14.2 | M00001469A:C10 |
| 122 | 2448 | RTA00000119A.j.21.1 | M00001460A:F06 |
| 123 | 3389 | RTA00000189AF.g.3.1 | M00003857A:G10 |
| 124 | 39174 | RTA00000124A.n.13.1 | M00001541A:H03 |
| 125 | 24488 | RTA00000190AF.n.16.1 | M00003968B:F06 |
| 126 | 8210 | RTA00000192AF.n.13.1 | M00004197D:H01 |
| 127 | | RTA00000135A.l.2.2 | M00001545A:B02 |
| 128 | 40455 | RTA00000190AF.m.10.2 | M00003958C:G10 |
| 129 | 9577 | RTA00000180AF.d.23.1 | M00001421C:F01 |
| 130 | 13183 | RTA00000192AF.a.24.1 | M00004114C:F11 |
| 131 | 5214 | RTA00000186AF.g.11.1 | M00001630B:H09 |
| 132 | 67252 | RTA00000187AF.o.6.1 | M00001716D:H05 |
| 133 | 3108 | RTA00000188AF.d.24.1 | M00003763A:F06 |
| 134 | 2464 | RTA00000178AF.n.18.1 | M00001387A:C05 |
| 135 | 36313 | RTA00000181AF.e.23.1 | M00001448D:H01 |
| 136 | 23255 | RTA00000177AF.e.14.3 | M00001343D:H07 |
| 137 | 7985 | RTA00000182AR.j.2.1 | M00001481D:A05 |
| 138 | 8286 | RTA00000183AF.o.1.1 | M00001540A:D06 |
| 139 | 22195 | RTA00000180AF.g.7.1 | M00001425B:H08 |
| 140 | 4573 | RTA00000184AF.h.9.1 | M00001553B:F12 |
| 141 | 26875 | RTA00000187AF.i.1.1 | M00001679A:F10 |
| 142 | 7187 | RTA00000177AF.i.8.2 | M00001350A:H01 |
| 143 | 86859 | RTA00000118A.p.8.1 | M00001452A:B12 |
| 144 | 4623 | RTA00000185AF.f.4.1 | M00001586C:C05 |
| 145 | | RTA00000121A.c.10.1 | M00001469A:A01 |
| 146 | 10185 | RTA00000183AF.d.5.1 | M00001504C:A07 |
| 147 | | RTA00000183AF.p.4.1 | M00001542B:B01 |
| 148 | 15069 | RTA00000191AF.l.6.1 | M00004081C:D10 |
| 149 | 39304 | RTA00000118A.j.21.1 | M00001450A:A02 |
| 150 | 8672 | RTA00000190AF.f.11.1 | M00003909D:C03 |
| 151 | 13576 | RTA00000177AF.g.16.1 | M00001347A:B10 |
| 152 | 6293 | RTA00000185AF.e.11.1 | M00001583D:A10 |
| 153 | 16977 | RTA00000192AF.g.3.1 | M00004151D:B08 |
| 154 | 5345 | RTA00000189AF.l.19.1 | M00003879B:C11 |
| 155 | 4905 | RTA00000193AF.e.14.1 | M00004269D:D06 |
| 156 | 17036 | RTA00000191AF.j.10.1 | M00004072B:B05 |
| 157 | 5417 | RTA00000191AF.h.19.1 | M00004059A:D06 |
| 158 | 7172 | RTA00000178AF.f.9.1 | M00001371C:E09 |
| 159 | 40044 | RTA00000186AF.d.1.1 | M00001621C:C08 |
| 160 | 4386 | RTA00000184AF.j.4.1 | M00001556B:C08 |
| 161 | 40044 | RTA00000183AF.g.22.1 | M00001514C:D11 |
| 162 | 9685 | RTA00000183AF.c.11.1 | M00001501D:C02 |
| 163 | 22155 | RTA00000185AF.n.9.1 | M00001608B:E03 |
| 164 | 10515 | RTA00000189AF.f.18.1 | M00003853A:F12 |
| 165 | 6539 | RTA00000185AF.d.11.1 | M00001579D:C03 |
| 166 | 15066 | RTA00000180AF.e.24.1 | M00001423B:E07 |
| 167 | 4261 | RTA00000180AF.h.5.1 | M00001426D:C08 |
| 168 | 13864 | RTA00000125A.m.9.1 | M00001545A:D08 |
| 169 | 6539 | RTA00000189AF.d.22.1 | M00003844C:B11 |
| 170 | 11465 | RTA00000185AF.m.19.1 | M00001607A:E11 |
| 171 | 3266 | RTA00000184AR.g.1.1 | M00001551C:G09 |
| 172 | 102 | RTA00000184AF.o.5.1 | M00001563B:F06 |
| 173 | 16970 | RTA00000181AR.i.18.2 | M00001452C:B06 |
| 174 | 12971 | RTA00000193AF.a.20.1 | M00004223D:E04 |
| 175 | 5007 | RTA00000177AF.g.2.1 | M00001346A:F09 |
| 176 | 3765 | RTA00000135A.d.1.1 | M00001541A:D02 |
| 177 | 11294 | RTA00000184AF.j.6.1 | M00001556B:G02 |
| 178 | 3681 | RTA00000131A.g.15.2 | M00001449A:D12 |
| 179 | 9283 | RTA00000181AR.m.21.2 | M00001455D:F09 |
| 180 | 18699 | RTA00000182AF.m.16.1 | M00001490B:C04 |
| 181 | 86110 | RTA00000181AF.f.12.1 | M00001449C:D06 |
| 182 | 39648 | RTA00000178AR.l.8.2 | M00001383A:C03 |
| 183 | 7337 | RTA00000123A.b.17.1 | M00001528A:C04 |
| 184 | 1334 | RTA00000178AF.j.7.1 | M00001379A:A05 |
| 185 | 17076 | RTA00000188AF.d.21.1 | M00003762C:B08 |
| 186 | 22794 | RTA00000138A.b.5.1 | M00001601A:D08 |
| 187 | 39171 | RTA00000186AF.l.7.1 | M00001644C:B07 |
| 188 | 8551 | RTA00000179AF.p.21.1 | M00001412B:B10 |
| 189 | 5857 | RTA00000118A.g.14.1 | M00001449A:A12 |
| 190 | 9443 | RTA00000183AF.c.1.1 | M00001500C:E04 |
| 191 | 9457 | RTA00000193AF.i.14.2 | M00004307C:A06 |
| 192 | 7206 | RTA00000182AF.o.15.1 | M00001494D:F06 |
| 193 | 22979 | RTA00000178AF.k.22.1 | M00001382C:A02 |
| 194 | 40455 | RTA00000190AR.m.10.1 | M00003958C:G10 |
| 195 | 7221 | RTA00000191AF.p.9.1 | M00004105C:A04 |
| 196 | | RTA00000191AF.j.9.1 | M00004072A:C03 |
| 197 | 7239 | RTA00000126A.m.4.2 | M00001550A:A03 |
| 198 | 31587 | RTA00000189AF.l.20.1 | M00003879B:D10 |
| 199 | 16317 | RTA00000190AF.e.6.1 | M00003907D:H04 |
| 200 | 13576 | RTA00000189AR.o.13.1 | M00003885C:A02 |
| 201 | 5779 | RTA00000177AF.g.14.3 | M00001346D:G06 |
| 202 | 6124 | RTA00000191AR.e.2.3 | M00004028D:A06 |
| 203 | 9952 | RTA00000180AF.c.20.1 | M00001418B:F03 |
| 204 | | RTA00000188AF.i.8.1 | M00003784D:D12 |
| 205 | 5779 | RTA00000177AF.g.14.1 | M00001346D:G06 |
| 206 | 39490 | RTA00000128A.b.4.1 | M00001557A:F03 |
| 207 | 4416 | RTA00000187AF.h.13.1 | M00001678D:F12 |
| 208 | 4009 | RTA00000179AF.e.20.1 | M00001396A:C03 |
| 209 | 5336 | RTA00000183AF.b.13.1 | M00001500A:C05 |
| 210 | 39186 | RTA00000121A.p.15.1 | M00001512A:A09 |
| 211 | 40122 | RTA00000190AF.n.23.1 | M00003970C:B09 |
| 212 | 12532 | RTA00000190AF.g.2.1 | M00003912B:D01 |
| 213 | 8078 | RTA00000177AR.l.13.1 | M00001353A:G12 |
| 214 | 3900 | RTA00000190AF.g.13.1 | M00003914C:F05 |
| 215 | 7589 | RTA00000120A.p.23.1 | M00001468A:F05 |
| 216 | 8298 | RTA00000127A.d.19.1 | M00001553A:H06 |
| 217 | 4443 | RTA00000177AF.b.20.4 | M00001341A:E12 |
| 218 | 26295 | RTA00000193AF.i.24.2 | M00004312A:G03 |
| 219 | 3389 | RTA00000183AF.m.19.1 | M00001537B:G07 |
| 220 | 7015 | RTA00000187AF.f.18.1 | M00001673C:H02 |
| 221 | 8526 | RTA00000180AF.d.1.1 | M00001418D:B06 |
| 222 | 4665 | RTA00000186AF.m.3.1 | M00001648C:A01 |
| 223 | 1399 | RTA00000129A.o.10.1 | M00001604A:B10 |
| 224 | 9244 | RTA00000127A.l.3.1 | M00001556A:C09 |
| 225 | | RTA00000179AF.j.13.1 | M00001400B:H06 |
| 226 | 82498 | RTA00000118A.m.10.1 | M00001450A:B12 |
| 227 | 35702 | RTA00000187AR.c.15.2 | M00001663A:E04 |
| 228 | 38759 | RTA00000120A.m.12.3 | M00001467A:B07 |
| 229 | 39648 | RTA00000178AF.l.8.1 | M00001383A:C03 |
| 230 | 19105 | RTA00000133A.e.15.1 | M00001469A:H12 |
| 231 | 85064 | RTA00000131A.m.23.1 | M00001452A:F05 |
| 232 | 9285 | RTA00000191AF.m.18.1 | M00004086D:G06 |
| 233 | 9285 | RTA00000190AF.d.7.1 | M00003906C:E10 |
| 234 | 39391 | RTA00000138A.c.3.1 | M00001604A:F05 |
| 235 | | RTA00000178AF.d.20.1 | M00001368D:E03 |
| 236 | 39498 | RTA00000119A.j.20.1 | M00001460A:F12 |
| 237 | 7798 | RTA00000189AF.k.12.1 | M00003876D:E12 |
| 238 | 7798 | RTA00000189AF.c.18.1 | M00003839A:D08 |
| 239 | 19829 | RTA00000125A.h.24.4 | M00001544A:G02 |
| 240 | | RTA00000188AF.d.11.1 | M00003761D:A09 |
| 241 | 4275 | RTA00000120A.j.14.1 | M00001466A:E07 |
| 242 | 22113 | RTA00000125A.c.7.1 | M00001542A:A09 |
| 243 | 40314 | RTA00000186AF.c.15.1 | M00001619C:F12 |
| 244 | 10944 | RTA00000126A.h.17.2 | M00001549A:D08 |
| 245 | 39809 | RTA00000190AF.e.3.1 | M00003907D:A09 |
| 246 | 22085 | RTA00000135A.e.5.2 | M00001541A:F07 |
| 247 | 19255 | RTA00000135A.m.18.1 | M00001545A:C03 |
| 248 | 14311 | RTA00000192AF.o.2.1 | M00004203B:C12 |
| 249 | 8479 | RTA00000189AF.j.22.1 | M00003875C:G07 |
| 250 | | RTA00000189AF.j.23.1 | M00003875D:D11 |
| 251 | 4193 | RTA00000184AF.e.13.1 | M00001549B:F06 |
| 252 | 22814 | RTA00000184AF.h.14.1 | M00001553D:D10 |
| 253 | 39563 | RTA00000179AF.k.20.1 | M00001402A:E08 |
| 254 | 39420 | RTA00000134A.o.23.1 | M00001537A:F12 |
| 255 | 11589 | RTA00000177AF.b.17.4 | M00001340D:F10 |
| 256 | 4937 | RTA00000191AF.p.21.1 | M00004108A:E06 |
| 257 | 39412 | RTA00000133A.k.17.1 | M00001511A:H06 |
| 258 | 4837 | RTA00000185AR.k.3.2 | M00001597C:H02 |
| 259 | 13046 | RTA00000193AF.h.19.1 | M00004296C:H07 |
| 260 | 4141 | RTA00000177AF.p.20.3 | M00001361A:A05 |
| 261 | 38085 | RTA00000123A.e.15.1 | M00001531A:D01 |
| 262 | | RTA00000189AF.p.8.1 | M00003891C:H09 |
| 263 | 11451 | RTA00000192AF.p.17.1 | M00004214C:H05 |
| 264 | 14507 | RTA00000189AR.l.23.2 | M00003879D:A02 |
| 265 | 40054 | RTA00000180AF.p.10.1 | M00001439C:F08 |
| 266 | 39423 | RTA00000134A.k.22.1 | M00001535A:F10 |
| 267 | 39453 | RTA00000135A.g.11.1 | M00001542A:E06 |
| 268 | 10751 | RTA00000187AF.k.7.1 | M00001679D:D03 |
| 269 | 10751 | RTA00000187AF.k.6.1 | M00001679D:D03 |
| 270 | 78091 | RTA00000187AF.j.6.1 | M00001679C:F01 |
| 271 | 39539 | RTA00000127A.i.21.1 | M00001555A:B02 |
| 272 | | RTA00000182AF.l.15.1 | M00001487B:H06 |
| 273 | | RTA00000194AF.d.13.1 | M00004896A:C07 |
| 274 | | RTA00000128A.c.20.1 | M00001558A:H05 |
| 275 | 9283 | RTA00000181AR.m.22.2 | M00001455D:F09 |
| 276 | 39168 | RTA00000121A.l.10.1 | M00001507A:H05 |
| 277 | 39458 | RTA00000126A.p.15.2 | M00001552A:D11 |
| 278 | 14391 | RTA00000177AF.m.17.3 | M00001355B:G10 |
| 279 | 39195 | RTA00000137A.c.16.1 | M00001555A:C01 |
| 280 | 7212 | RTA00000193AF.b.14.1 | M00004230B:C07 |
| 281 | 4015 | RTA00000136A.e.12.1 | M00001549A:B02 |
| 282 | 12977 | RTA00000189AF.j.19.1 | M00003875B:F04 |
| 283 | | RTA00000178AF.m.13.1 | M00001384B:A11 |
| 284 | 14391 | RTA00000191AF.l.7.1 | M00004081C:D12 |
| 285 | | RTA00000194AF.c.23.1 | M00004691D:A05 |
| 286 | | RTA00000181AF.b.7.1 | M00001443B:F01 |
| 287 | 8358 | RTA00000183AF.i.5.1 | M00001528B:H04 |
| 288 | 1267 | RTA00000125A.o.5.1 | M00001546A:G11 |
| 289 | | RTA00000189AF.f.7.1 | M00003851B:D08 |
| 290 | 16347 | RTA00000184AF.e.15.1 | M00001549C:E06 |
| 291 | 7899 | RTA00000193AF.a.17.1 | M00004223B:D09 |
| 292 | 2379 | RTA00000178AF.a.6.1 | M00001361D:F08 |
| 293 | 39478 | RTA00000133A.i.5.1 | M00001471A:B01 |
| 294 | 39392 | RTA00000134A.m.16.1 | M00001536A:C08 |
| 295 | 5053 | RTA00000184AF.o.12.1 | M00001564A:B12 |
| 296 | 16999 | RTA00000185AF.k.9.1 | M00001598A:G03 |
| 297 | 39180 | RTA00000126A.n.8.2 | M00001551A:F05 |
| 298 | 1037 | RTA00000121A.f.8.1 | M00001470A:B10 |
| 299 | 6867 | RTA00000178AF.e.12.1 | M00001370A:C09 |
| 300 | 10539 | RTA00000183AF.a.24.1 | M00001499B:A11 |
| 301 | 41633 | RTA00000118A.g.16.1 | M00001449A:B12 |
| 302 | 23218 | RTA00000187AR.c.5.2 | M00001662C:A09 |
| 303 | 39380 | RTA00000129A.e.24.1 | M00001587A:B11 |
| 304 | | RTA00000185AF.d.24.1 | M00001582D:F05 |
| 305 | | RTA00000177AF.o.4.3 | M00001358C:C06 |
| 306 | 6974 | RTA00000184AF.a.15.1 | M00001544B:B07 |
| 307 | | RTA00000185AF.g.11.1 | M00001590B:F03 |
| 308 | 15855 | RTA00000184AF.j.1.1 | M00001556A:H01 |
| 309 | 84328 | RTA00000118A.p.10.1 | M00001452A:B04 |
| 310 | 10145 | RTA00000120A.g.12.1 | M00001465A:B11 |
| 311 | 39805 | RTA00000177AF.c.21.3 | M00001342B:E06 |
| 312 | | RTA00000187AF.h.23.1 | M00001679A:F06 |
| 313 | 6298 | RTA00000187AR.i.10.2 | M00001679B:F01 |
| 314 | 14367 | RTA00000187AF.e.8.1 | M00001670C:H02 |
| 315 | | RTA00000193AF.c.22.1 | M00004249D:G12 |
| 316 | 16921 | RTA00000183AF.k.6.1 | M00001534A:C04 |
| 317 | 1577 | RTA00000184AF.i.23.1 | M00001556A:F11 |
| 318 | 8773 | RTA00000187AF.f.24.1 | M00001675A:C09 |
| 319 | | RTA00000194AF.a.11.1 | M00004461A:B09 |
| 320 | 39886 | RTA00000178AF.j.24.1 | M00001380D:B09 |
| 321 | 13532 | RTA00000181AF.c.4.1 | M00001445A:F05 |
| 322 | | RTA00000193AF.d.2.1 | M00004251C:G07 |
| 323 | 5257 | RTA00000192AF.f.3.1 | M00004146C:C11 |
| 324 | 9061 | RTA00000191AR.e.11.2 | M00004031A:A12 |
| 325 | 19267 | RTA00000186AF.l.12.1 | M00001645A:C12 |
| 326 | 20212 | RTA00000134A.l.22.1 | M00001535A:C06 |
| 327 | 16653 | RTA00000181AF.k.5.3 | M00001453C:F06 |
| 328 | 16985 | RTA00000177AF.h.10.1 | M00001348B:G06 |
| 329 | 12977 | RTA00000189AR.j.19.1 | M00003875B:F04 |
| 330 | 9061 | RTA00000191AR.e.11.3 | M00004031A:A12 |
| 331 | | RTA00000194AR.a.10.2 | M00004461A:B08 |
| 332 | 6468 | RTA00000187AF.d.15.1 | M00001669B:F02 |
| 333 | 16392 | RTA00000192AF.l.1.1 | M00004183C:D07 |
| 334 | 14627 | RTA00000187AF.g.23.1 | M00001677C:E10 |
| 335 | 6583 | RTA00000179AF.d.13.1 | M00001394A:F01 |
| 336 | 6806 | RTA00000177AF.g.13.3 | M00001346D:E03 |
| 337 | 9635 | RTA00000137A.e.23.4 | M00001557A:F01 |
| 338 | 689 | RTA00000181AR.l.22.1 | M00001454D:G03 |
| 339 | 4119 | RTA00000183AF.k.16.1 | M00001534C:A01 |
| 340 | 8952 | RTA00000183AF.h.15.1 | M00001518C:B11 |
| 341 | 2379 | RTA00000192AF.p.8.1 | M00004212B:C07 |
| 342 | 39486 | RTA00000128A.m.22.2 | M00001561A:C05 |
| 343 | 21877 | RTA00000189AF.b.21.1 | M00003833A:E05 |
| 344 | 6874 | RTA00000192AF.a.14.1 | M00004111D:A08 |
| 345 | 6874 | RTA00000189AF.e.9.1 | M00003846B:D06 |
| 346 | 37285 | RTA00000191AF.f.11.1 | M00004035C:A07 |
| 347 | | RTA00000193AF.j.20.1 | M00004327B:H04 |
| 348 | 7674 | RTA00000118A.g.9.1 | M00001416A:H01 |
| 349 | 2797 | RTA00000180AF.i.19.1 | M00001429A:H04 |
| 350 | | RTA00000184AF.g.22.1 | M00001552D:A01 |
| 351 | 7802 | RTA00000185AF.n.5.1 | M00001608A:B03 |
| 352 | 16921 | RTA00000193AF.h.15.1 | M00004295D:F12 |
| 353 | 11494 | RTA00000192AF.j.6.1 | M00004172C:D08 |
| 354 | 17062 | RTA00000177AF.b.8.4 | M00001340B:A06 |
| 355 | 16245 | RTA00000177AF.k.9.3 | M00001352A:E02 |
| 356 | 83103 | RTA00000119A.e.24.2 | M00001454A:A09 |
| 357 | 4309 | RTA00000186AF.e.22.1 | M00001624C:F01 |
| 358 | 13072 | RTA00000181AR.m.5.2 | M00001455B:E12 |
| 359 | 4059 | RTA00000177AF.n.18.3 | M00001357D:D11 |
| 360 | 5178 | RTA00000178AF.n.10.1 | M00001386C:B12 |
| 361 | 1120 | RTA00000118A.p.15.3 | M00001452A:D08 |
| 362 | 6420 | RTA00000183AF.d.11.1 | M00001504D:G06 |
| 363 | 13913 | RTA00000186AF.e.6.1 | M00001623D:F10 |
| 364 | | RTA00000192AF.c.2.1 | M00004121B:G01 |
| 365 | 3956 | RTA00000183AF.g.3.1 | M00001512D:G09 |
| 366 | 14364 | RTA00000183AF.g.12.1 | M00001513C:E08 |
| 367 | 6880 | RTA00000191AF.m.20.1 | M00004087D:A01 |
| 368 | 84182 | RTA00000180AF.h.19.1 | M00001428A:H10 |
| 369 | 2790 | RTA00000177AF.e.2.1 | M00001343C:F10 |
| 370 | 4561 | RTA00000184AF.i.21.1 | M00001555D:G10 |
| 371 | 8847 | RTA00000180AF.b.16.1 | M00001416B:H11 |
| 372 | 56020 | RTA00000193AF.g.2.1 | M00004285B:E08 |
| 373 | 1531 | RTA00000119A.o.3.1 | M00001461A:D06 |
| 374 | 6420 | RTA00000177AF.f.10.3 | M00001345A:E01 |
| 375 | | RTA00000188AF.b.12.1 | M00003754C:E09 |
| 376 | | RTA00000180AF.k.24.1 | M00001432C:F06 |
| 377 | | RTA00000184AF.a.8.1 | M00001544A:E06 |
| 378 | 2696 | RTA00000134A.m.13.1 | M00001536A:B07 |
| 379 | 260 | RTA00000185AR.i.12.2 | M00001594B:H04 |
| 380 | 11350 | RTA00000189AF.a.24.2 | M00003826B:A06 |
| 381 | 2428 | RTA00000123A.l.21.1 | M00001533A:C11 |
| 382 | 4313 | RTA00000122A.n.3.1 | M00001517A:B07 |
| 383 | | RTA00000184AF.p.3.1 | M00001566B:D11 |
| 384 | 697 | RTA00000188AF.d.6.1 | M00003759B:B09 |
| 385 | 5619 | RTA00000188AF.l.9.1 | M00003796C:D05 |
| 386 | 4568 | RTA00000122A.d.15.3 | M00001513A:B06 |
| 387 | | RTA00000177AF.i.6.2 | M00001350A:B08 |
| 388 | 5622 | RTA00000178AF.a.11.1 | M00001362B:D10 |
| 389 | 7514 | RTA00000184AF.k.21.1 | M00001558B:H11 |
| 390 | 5619 | RTA00000189AF.f.17.1 | M00003853A:D04 |
| 391 | 7570 | RTA00000187AF.g.24.1 | M00001677D:A07 |
| 392 | 23358 | RTA00000190AF.o.21.1 | M00003974D:H02 |
| 393 | 23210 | RTA00000190AF.o.20.1 | M00003974D:E07 |
| 394 | 5192 | RTA00000184AF.k.2.1 | M00001557B:H10 |
| 395 | 13538 | RTA00000180AF.a.24.1 | M00001415A:H06 |
| 396 | | RTA00000189AF.h.17.1 | M00003867A:D10 |
| 397 | | RTA00000192AF.o.11.1 | M00004205D:F06 |
| 398 | | RTA00000184AF.l.11.1 | M00001559B:F01 |
| 399 | 4718 | RTA00000189AF.g.5.1 | M00003857A:H03 |
| 400 | 14929 | RTA00000177AF.m.1.2 | M00001353D:D10 |
| 401 | 4908 | RTA00000192AF.j.2.1 | M00004171D:B03 |
| 402 | | RTA00000178AF.k.16.1 | M00001381D:E06 |
| 403 | | RTA00000194AF.c.24.1 | M00004692A:H08 |
| 404 | 17732 | RTA00000178AR.i.2.2 | M00001376B:G06 |
| 405 | 17062 | 80.A1.sp6:130208.Seq | M00001340B:A06 |
| 406 | 11589 | 80.B1.sp6:130220.Seq | M00001340D:F10 |
| 407 | 4443 | 80.C1.sp6:130232.Seq | M00001341A:E12 |
| 408 | 39805 | 80.D1.sp6:130244.Seq | M00001342B:E06 |
| 409 | 2790 | 80.E1.sp6:130256.Seq | M00001343C:F10 |
| 410 | 23255 | 80.F1.sp6:130268.Seq | M00001343D:H07 |
| 411 | 6420 | 80.G1.sp6:130280.Seq | M00001345A:E01 |
| 412 | 5007 | 80.H1.sp6:130292.Seq | M00001346A:F09 |
| 413 | 13576 | 80.D2.sp6:130245.Seq | M00001347A:B10 |
| 414 | 16927 | 80.E2.sp6:130257.Seq | M00001348B:B04 |
| 415 | 16985 | 80.F2.sp6:130269.Seq | M00001348B:G06 |
| 416 | 3584 | 80.G2.sp6:130281.Seq | M00001349B:B08 |
| 417 | | 80.H2.sp6:130293.Seq | M00001350A:B08 |
| 418 | 7187 | 80.A3.sp6:130210.Seq | M00001350A:H01 |
| 419 | 16245 | 80.D3.sp6:130246.Seq | M00001352A:E02 |
| 420 | 8078 | 80.E3.sp6:130258.Seq | M00001353A:G12 |
| 421 | 14929 | 80.F3.sp6:130270.Seq | M00001353D:D10 |
| 422 | 14391 | 80.G3.sp6:130282.Seq | M00001355B:G10 |
| 423 | 4141 | 80.B4.sp6:130223.Seq | M00001361A:A05 |
| 424 | 2379 | 80.C4.sp6:130235.Seq | M00001361D:F08 |
| 425 | 5622 | 80.D4.sp6:130247.Seq | M00001362B:D10 |
| 426 | 945 | 80.E4.sp6:130259.Seq | M00001362C:H11 |
| 427 | 40132 | 80.F4.sp6:130271.Seq | M00001365C:C10 |
| 428 | | 80.G4.sp6:130283.Seq | M00001368D:E03 |
| 429 | 6867 | 80.H4.sp6:130295.Seq | M00001370A:C09 |
| 430 | 7172 | 80.A5.sp6:130212.Seq | M00001371C:E09 |
| 431 | 17732 | 80.B5.sp6:130224.Seq | M00001376B:G06 |
| 432 | 39833 | 80.C5.sp6:130236.Seq | M00001378B:B02 |
| 433 | 1334 | 80.D5.sp6:130248.Seq | M00001379A:A05 |
| 434 | 39886 | 80.E5.sp6:130260.Seq | M00001380D:B09 |
| 435 | | 80.F5.sp6:130272.Seq | M00001381D:E06 |
| 436 | 22979 | 80.G5.sp6:130284.Seq | M00001382C:A02 |
| 437 | 39648 | 80.H5.sp6:130296.Seq | M00001383A:C03 |
| 438 | | 80.B6.sp6:130225.Seq | M00001384B:A11 |
| 439 | 5178 | 80.C6.sp6:130237.Seq | M00001386C:B12 |
| 440 | 2464 | 80.D6.sp6:130249.Seq | M00001387A:C05 |
| 441 | 7587 | 80.E6.sp6:130261.Seq | M00001387B:G03 |
| 442 | 5832 | 80.F6.sp6:130273.Seq | M00001388D:G05 |
| 443 | 16269 | 80.G6.sp6:130285.Seq | M00001389A:C08 |
| 444 | 6583 | 80.H6.sp6:130297.Seq | M00001394A:F01 |
| 445 | 4009 | 80.A7.sp6:130214.Seq | M00001396A:C03 |
| 446 | | 80.B7.sp6:130226.Seq | M00001400B:H06 |
| 447 | 39563 | 80.C7.sp6:130238.Seq | M00001402A:E08 |
| 448 | 5556 | 80.D7.sp6:130250.Seq | M00001407B:D11 |
| 449 | 9577 | 80.E7.sp6:130262.Seq | M00001409C:D12 |
| 450 | 7005 | 80.F7.sp6:130274.Seq | M00001410A:D07 |
| 451 | 8551 | 80.G7.sp6:130286.Seq | M00001412B:B10 |
| 452 | | 80.H7.sp6:130298.Seq | M00001414A:B01 |
| 453 | | 80.A8.sp6:130215.Seq | M00001414C:A07 |
| 454 | 13538 | 80.B8.sp6:130227.Seq | M00001415A:H06 |
| 455 | 8847 | 80.C8.sp6:130239.Seq | M00001416B:H11 |
| 456 | 36393 | 80.D8.sp6:130251.Seq | M00001417A:E02 |
| 457 | 9952 | 80.E8.sp6:130263.Seq | M00001418B:F03 |
| 458 | 9577 | 80.G8.sp6:130287.Seq | M00001421C:F01 |
| 459 | 15066 | 80.H8.sp6:130299.Seq | M00001423B:E07 |
| 460 | 10470 | 80.A9.sp6:130216.Seq | M00001424B:G09 |
| 461 | 22195 | 80.B9.sp6:130228.Seq | M00001425B:H08 |
| 462 | | 80.C9.sp6:130240.Seq | M00001426B:D12 |
| 463 | 4261 | 80.D9.sp6:130252.Seq | M00001426D:C08 |
| 464 | 84182 | 80.E9.sp6:130264.Seq | M00001428A:H10 |
| 465 | 40392 | 80.H9.sp6:130300.Seq | M00001429D:D07 |
| 466 | 16731 | 80.C10.sp6:130241.Seq | M00001442C:D07 |
| 467 | | 80.D10.sp6:130253.Seq | M00001443B:F01 |
| 468 | 13532 | 80.E10.sp6:130265.Seq | M00001445A:F05 |
| 469 | 8 | 80.H10.sp6:130301.Seq | M00001448D:C09 |
| 470 | 36313 | 80.A11.sp6:130218.Seq | M00001448D:H01 |
| 471 | 5857 | 80.B11.sp6:130230.Seq | M00001449A:A12 |
| 472 | 41633 | 80.C11.sp6:130242.Seq | M00001449A:B12 |
| 473 | 36535 | 80.D11.sp6:130254.Seq | M00001449A:G10 |
| 474 | 86110 | 80.E11.sp6:130266.Seq | M00001449C:D06 |
| 475 | 32663 | 80.F11.sp6:130278.Seq | M00001450A:A11 |
| 476 | 27250 | 80.G11.sp6:130290.Seq | M00001450A:D08 |
| 477 | 16970 | 80.H11.sp6:130302.Seq | M00001452C:B06 |
| 478 | 16130 | 80.A12.sp6:130219.Seq | M00001453A:E11 |
| 479 | 16653 | 80.B12.sp6:130231.Seq | M00001453C:F06 |
| 480 | 7005 | 80.C12.sp6:130243.Seq | M00001454B:C12 |
| 481 | 13072 | 80.F12.sp6:130279.Seq | M00001455B:E12 |
| 482 | 9283 | 80.G12.sp6:130291.Seq | M00001455D:F09 |
| 483 | 23255 | 100.C1.sp6:131446.Seq | M00001343D:H07 |
| 484 | 13576 | 100.E1.sp6:131470.Seq | M00001347A:B10 |
| 485 | 7187 | 100.C2.sp6:131447.Seq | M00001350A:H01 |
| 486 | 14391 | 100.E3.sp6:131472.Seq | M00001355B:G10 |
| 487 | 945 | 100.E4.sp6:131473.Seq | M00001362C:H11 |
| 488 | 7172 | 100.A5.sp6:131426.Seq | M00001371C:E09 |
| 489 | 39648 | 100.A6.sp6:131427.Seq | M00001383A:C03 |
| 490 | 84182 | 100.G9.sp6:131502.Seq | M00001428A:H10 |
| 491 | 8 | 100.B11.sp6:131444.Seq | M00001448D:C09 |
| 492 | 36535 | 100.D11.sp6:131468.Seq | M00001449A:G10 |
| 493 | 82498 | 100.F11.sp6:131492.Seq | M00001450A:B12 |
| 494 | 16970 | 100.C12.sp6:131457.Seq | M00001452C:B06 |
| 495 | 16130 | 100.D12.sp6:131469.Seq | M00001453A:E11 |
| 496 | 7005 | 121.D1.sp6:131917.Seq | M00001454B:C12 |
| 497 | | 121.G6.sp6:131958.Seq | M00001506D:A09 |
| 498 | 18957 | 121.F7.sp6:131947.Seq | M00001528A:F09 |
| 499 | 40044 | 122.E1.sp6:132121.Seq | M00001621C:C08 |
| 500 | 5214 | 122.C2.sp6:132098.Seq | M00001630B:H09 |
| 501 | 6660 | 122.B5.sp6:132089.Seq | M00001679A:A06 |
| 502 | 13183 | 123.D5.sp6:132305.Seq | M00004114C:F11 |
| 503 | 6455 | 123.E7.sp6:132319.Seq | M00004157C:A09 |
| 504 | 5319 | 123.F7.sp6:132331.Seq | M00004169C:C12 |
| 505 | 11443 | 123.A8.sp6:132272.Seq | M00004185C:C03 |
| 506 | | 123.C8.sp6:132296.Seq | M00004191D:B11 |
| 507 | 8210 | 123.E8.sp6:132320.Seq | M00004197D:H01 |
| 508 | 9457 | 123.D11.sp6:132311.Seq | M00004307C:A06 |
| 509 | 6420 | 172.E1.sp6:133925.Seq | M00001345A:E01 |
| 510 | 16245 | 172.D2.sp6:133914.Seq | M00001352A:E02 |
| 511 | 8078 | 172.C3.sp6:133903.Seq | M00001353A:G12 |
| 512 | 14929 | 172.D3.sp6:133915.Seq | M00001353D:D10 |
| 513 | 14391 | 172.H3.sp6:133963.Seq | M00001355B:G10 |
| 514 | 6583 | 172.B8.sp6:133896.Seq | M00001394A:F01 |
| 515 | 4009 | 172.D8.sp6:133920.Seq | M00001396A:C03 |
| 516 | | 172.B9.sp6:133897.Seq | M00001400B:H06 |
| 517 | | 176.A3.sp6:134514.Seq | M00001632D:H07 |
| 518 | 19267 | 176.G3.sp6:134586.Seq | M00001645A:C12 |
| 519 | 78091 | 176.G5.sp6:134588.Seq | M00001679C:F01 |
| 520 | 17055 | 176.D6.sp6:134553.Seq | M00001682C:B12 |
| 521 | 6539 | 176.D9.sp6:134556.Seq | M00003844C:B11 |
| 522 | | 177.H4.sp6:134791.Seq | M00004121B:G01 |
| 523 | 5257 | 177.F5.sp6:134768.Seq | M00004146C:C11 |
| 524 | 11494 | 177.E6.sp6:134757.Seq | M00004172C:D08 |
| 525 | | 177.G7.sp6:134782.Seq | M00004205D:F06 |
| 526 | 11451 | 177.D8.sp6:134747.Seq | M00004214C:H05 |
| 527 | 9283 | 173.D2.SP6:134106.Seq | M00001455D:F09 |
| 528 | 16283 | 173.F3.SP6:134131.Seq | M00001467A:D08 |
| 529 | 10539 | 173.B5.SP6:134085.Seq | M00001499B:A11 |
| 530 | 6420 | 173.F5.SP6:134133.Seq | M00001504D:G06 |
| 531 | 3956 | 173.H5.SP6:134157.Seq | M00001512D:G09 |
| 532 | | 173.G7.SP6:134147.Seq | M00001544A:E06 |
| 533 | 1577 | 173.C9.SP6:134101.Seq | M00001556A:F11 |
| 534 | 9635 | 173.D9.SP6:134113.Seq | M00001557A:F01 |
| 535 | 5192 | 173.E9.SP6:134125.Seq | M00001557B:H10 |
| 536 | 6539 | 173.A12.SP6:134080.Seq | M00001579D:C03 |
| 537 | 945 | 180.C2.sp6:135940.Seq | M00001362C:H11 |
| 538 | 7005 | 180.H5.sp6:136003.Seq | M00001410A:D07 |
| 539 | 39304 | 180.G9.sp6:135995.Seq | M00001450A:A02 |
| 540 | 27250 | 180.B10.sp6:135936.Seq | M00001450A:D08 |
| 541 | 35555 | 184.A5.sp6:135530.Seq | M00001528A:C04 |
| 542 | 19255 | 184.B10.sp6:135547.Seq | M00001545A:C03 |
| 543 | 6268 | 184.C12.sp6:135561.Seq | M00001551A:B10 |
| 544 | 3277 | 217.E1.sp6:139406.Seq | M00001624A:B06 |
| 545 | 39171 | 217.A12.sp6:139369.Seq | M00001644C:B07 |
| 546 | 11460 | 219.F2.sp6:139035.Seq | M00001676B:F05 |
| 547 | 10539 | 219.F6.sp6:139039.Seq | M00001680D:F08 |
| 548 | 11476 | 219.H8.sp6:139065.Seq | M00003747D:C05 |
| 549 | 4016 | 79.A1.sp6:130016.Seq | M00001395A:C03 |
| 550 | 7674 | 79.C1.sp6:130040.Seq | M00001416A:H01 |
| 551 | 3681 | 79.E1.sp6:130064.Seq | M00001449A:D12 |
| 552 | 39304 | 79.F1.sp6:130076.Seq | M00001450A:A02 |
| 553 | 82498 | 79.G1.sp6:130088.Seq | M00001450A:B12 |
| 554 | 84328 | 79.A2.sp6:130017.Seq | M00001452A:B04 |
| 555 | 86859 | 79.B2.sp6:130029.Seq | M00001452A:B12 |
| 556 | 1120 | 79.C2.sp6:130041.Seq | M00001452A:D08 |
| 557 | 85064 | 79.D2.sp6:130053.Seq | M00001452A:F05 |
| 558 | 83103 | 79.G2.sp6:130089.Seq | M00001454A:A09 |
| 559 | 10145 | 79.F3.sp6:130078.Seq | M00001465A:B11 |
| 560 | 16283 | 79.H3.sp6:130102.Seq | M00001467A:D08 |
| 561 | 4568 | 79.D4.sp6:130055.Seq | M00001513A:B06 |
| 562 | 4313 | 79.F4.sp6:130079.Seq | M00001517A:B07 |
| 563 | 2428 | 79.A5.sp6:130020.Seq | M00001533A:C11 |
| 564 | 39423 | 79.C5.sp6:130044.Seq | M00001535A:F10 |
| 565 | 39174 | 79.E5.sp6:130068.Seq | M00001541A:H03 |
| 566 | 22113 | 79.F5.sp6:130080.Seq | M00001542A:A09 |
| 567 | 19829 | 79.H5.sp6:130104.Seq | M00001544A:G02 |
| 568 | 13864 | 79.B6.sp6:130033.Seq | M00001545A:D08 |
| 569 | 1058 | 79.F6.sp6:130081.Seq | M00001548A:H09 |
| 570 | 4015 | 79.G6.sp6:130093.Seq | M00001549A:B02 |
| 571 | 39180 | 79.A7.sp6:130022.Seq | M00001551A:F05 |
| 572 | 307 | 79.C7.sp6:130046.Seq | M00001552A:B12 |
| 573 | 39458 | 79.D7.sp6:130058.Seq | M00001552A:D11 |
| 574 | 39490 | 79.G7.sp6:130094.Seq | M00001557A:F03 |
| 575 | 39486 | 79.B8.sp6:130035.Seq | M00001561A:C05 |
| 576 | 39380 | 79.E8.sp6:130071.Seq | M00001587A:B11 |
| 577 | 1399 | 79.G8.sp6:130095.Seq | M00001604A:B10 |
| 578 | 39391 | 79.A9.sp6:130024.Seq | M00001604A:F05 |
| 579 | 6268 | 79.G9.sp6:130096.Seq | M00001551A:B10 |
| 580 | | 377.F4.sp6:141957.Seq | M00004692A:H08 |
| 581 | 2448 | 89.A1.sp6:130667.Seq | M00001460A:F06 |
| 582 | 1531 | 89.C1.sp6:130691.Seq | M00001461A:D06 |
| 583 | 19 | 89.D1.sp6:130703.Seq | M00001463C:B11 |
| 584 | 38759 | 89.F1.sp6:130727.Seq | M00001467A:B07 |
| 585 | 39508 | 89.G1.sp6:130739.Seq | M00001467A:D04 |
| 586 | 16283 | 89.H1.sp6:130751.Seq | M00001467A:D08 |
| 587 | 39442 | 89.A2.sp6:130668.Seq | M00001467A:E10 |
| 588 | 7589 | 89.B2.sp6:130680.Seq | M00001468A:F05 |
| 589 | | 89.C2.sp6:130692.Seq | M00001469A:A01 |
| 590 | 12081 | 89.D2.sp6:130704.Seq | M00001469A:C10 |
| 591 | 19105 | 89.E2.sp6:130716.Seq | M00001469A:H12 |
| 592 | 1037 | 89.F2.sp6:130728.Seq | M00001470A:B10 |
| 593 | 39425 | 89.G2.sp6:130740.Seq | M00001470A:C04 |
| 594 | 39478 | 89.H2.sp6:130752.Seq | M00001471A:B01 |
| 595 | | 89.B3.sp6:130681.Seq | M00001487B:H06 |
| 596 | | 89.C3.sp6:130693.Seq | M00001488B:F12 |
| 597 | 18699 | 89.D3.sp6:130705.Seq | M00001490B:C04 |
| 598 | 7206 | 89.E3.sp6:130717.Seq | M00001494D:F06 |
| 599 | 2623 | 89.F3.sp6:130729.Seq | M00001497A:G02 |
| 600 | 10539 | 89.G3.sp6:130741.Seq | M00001499B:A11 |
| 601 | 5336 | 89.H3.sp6:130753.Seq | M00001500A:C05 |
| 602 | 2623 | 89.A4.sp6:130670.Seq | M00001500A:E11 |
| 603 | 9443 | 89.B4.sp6:130682.Seq | M00001500C:E04 |
| 604 | 9685 | 89.C4.sp6:130694.Seq | M00001501D:C02 |
| 605 | | 89.D4.sp6:130706.Seq | M00001504A:E01 |
| 606 | 10185 | 89.E4.sp6:130718.Seq | M00001504C:A07 |
| 607 | 6974 | 89.F4.sp6:130730.Seq | M00001504C:H06 |
| 608 | 6420 | 89.G4.sp6:130742.Seq | M00001504D:G06 |
| 609 | | 89.H4.sp6:130754.Seq | M00001505C:C05 |
| 610 | | 89.A5.sp6:130671.Seq | M00001506D:A09 |
| 611 | 39168 | 89.B5.sp6:130683.Seq | M00001507A:H05 |
| 612 | 39412 | 89.C5.sp6:130695.Seq | M00001511A:H06 |
| 613 | 39186 | 89.D5.sp6:130707.Seq | M00001512A:A09 |
| 614 | 3956 | 89.E5.sp6:130719.Seq | M00001512D:G09 |
| 615 | | 89.F5.sp6:130731.Seq | M00001513B:G03 |
| 616 | 14364 | 89.G5.sp6:130743.Seq | M00001513C:E08 |
| 617 | 40044 | 89.H5.sp6:130755.Seq | M00001514C:D11 |
| 618 | 8952 | 89.A6.sp6:130672.Seq | M00001518C:B11 |
| 619 | 35555 | 89.B6.sp6:130684.Seq | M00001528A:C04 |
| 620 | 18957 | 89.C6.sp6:130696.Seq | M00001528A:F09 |
| 621 | 8358 | 89.D6.sp6:130708.Seq | M00001528B:H04 |
| 622 | 38085 | 89.E6.sp6:130720.Seq | M00001531A:D01 |
| 623 | | 89.F6.sp6:130732.Seq | M00001531A:H11 |
| 624 | 3990 | 89.G6.sp6:130744.Seq | M00001532B:A06 |
| 625 | 16921 | 89.H6.sp6:130756.Seq | M00001534A:C04 |
| 626 | 5321 | 89.B7.sp6:130685.Seq | M00001534A:F09 |
| 627 | 4119 | 89.C7.sp6:130697.Seq | M00001534C:A01 |
| 628 | 20212 | 89.E7.sp6:130721.Seq | M00001535A:C06 |
| 629 | 2696 | 89.F7.sp6:130733.Seq | M00001536A:B07 |
| 630 | 39392 | 89.G7.sp6:130745.Seq | M00001536A:C08 |
| 631 | 39420 | 89.H7.sp6:130757.Seq | M00001537A:F12 |
| 632 | 3389 | 89.A8.sp6:130674.Seq | M00001537B:G07 |
| 633 | 8286 | 89.B8.sp6:130686.Seq | M00001540A:D06 |
| 634 | 3765 | 89.C8.sp6:130698.Seq | M00001541A:D02 |
| 635 | 39453 | 89.E8.sp6:130722.Seq | M00001542A:E06 |
| 636 | | 89.F8.sp6:130734.Seq | M00001542B:B01 |
| 637 | | 89.H8.sp6:130758.Seq | M00001544A:E06 |
| 638 | 6974 | 89.A9.sp6:130675.Seq | M00001544B:B07 |
| 639 | | 89.B9.sp6:130687.Seq | M00001545A:B02 |
| 640 | 19255 | 89.C9.sp6:130699.Seq | M00001545A:C03 |
| 641 | 1267 | 89.D9.sp6:130711.Seq | M00001546A:G11 |
| 642 | 5892 | 89.E9.sp6:130723.Seq | M00001548A:E10 |
| 643 | 4193 | 89.G9.sp6:130747.Seq | M00001549B:F06 |
| 644 | 16347 | 89.H9.sp6:130759.Seq | M00001549C:E06 |
| 645 | 7239 | 89.A10.sp6:130676.Seq | M00001550A:A03 |
| 646 | 5175 | 89.B10.sp6:130688.Seq | M00001550A:G01 |
| 647 | 22390 | 89.C10.sp6:130700.Seq | M00001551A:G06 |
| 648 | 3266 | 89.D10.sp6:130712.Seq | M00001551C:G09 |
| 649 | 5708 | 89.E10.sp6:130724.Seq | M00001552B:D04 |
| 650 | | 89.F10.sp6:130736.Seq | M00001552D:A01 |
| 651 | 8298 | 89.G10.sp6:130748.Seq | M00001553A:H06 |
| 652 | 4573 | 89.H10.sp6:130760.Seq | M00001553B:F12 |
| 653 | 22814 | 89.A11.sp6:130677.Seq | M00001553D:D10 |
| 654 | 39539 | 89.B11.sp6:130689.Seq | M00001555A:B02 |
| 655 | 39195 | 89.C11.sp6:130701.Seq | M00001555A:C01 |
| 656 | 4561 | 89.D11.sp6:130713.Seq | M00001555D:G10 |
| 657 | 9244 | 89.E11.sp6:130725.Seq | M00001556A:C09 |
| 658 | 1577 | 89.F11.sp6:130737.Seq | M00001556A:F11 |
| 659 | 4386 | 89.H11.sp6:130761.Seq | M00001556B:C08 |
| 660 | 11294 | 89.A12.sp6:130678.Seq | M00001556B:G02 |
| 661 | 5192 | 89.D12.sp6:130714.Seq | M00001557B:H10 |
| 662 | 8761 | 89.E12.sp6:130726.Seq | M00001557D:D09 |
| 663 | | 89.F12.sp6:130738.Seq | M00001558A:H05 |
| 664 | 7514 | 89.G12.sp6:130750.Seq | M00001558B:H11 |
| 665 | | 89.H12.sp6:130762.Seq | M00001559B:F01 |
| 666 | 6558 | 90.A1.sp6:130859.Seq | M00001560D:F10 |
| 667 | 102 | 90.B1.sp6:130871.Seq | M00001563B:F06 |
| 668 | | 90.D1.sp6:130895.Seq | M00001566B:D11 |
| 669 | 5749 | 90.E1.sp6:130907.Seq | M00001571C:H06 |
| 670 | 6539 | 90.G1.sp6:130931.Seq | M00001579D:C03 |
| 671 | 6293 | 90.A2.sp6:130860.Seq | M00001583D:A10 |
| 672 | | 90.C2.sp6:130884.Seq | M00001590B:F03 |
| 673 | 260 | 90.D2.sp6:130896.Seq | M00001594B:H04 |
| 674 | 4837 | 90.E2.sp6:130908.Seq | M00001597C:H02 |
| 675 | 10470 | 90.F2.sp6:130920.Seq | M00001597D:C05 |
| 676 | 16999 | 90.G2.sp6:130932.Seq | M00001598A:G03 |
| 677 | 22794 | 90.H2.sp6:130944.Seq | M00001601A:D08 |
| 678 | 11465 | 90.A3.sp6:130861.Seq | M00001607A:E11 |
| 679 | 7802 | 90.B3.sp6:130873.Seq | M00001608A:B03 |
| 680 | 22155 | 90.C3.sp6:130885.Seq | M00001608B:E03 |
| 681 | | 90.D3.sp6:130897.Seq | M00001608D:A11 |
| 682 | 13157 | 90.E3.sp6:130909.Seq | M00001614C:F10 |
| 683 | 17004 | 90.F3.sp6:130921.Seq | M00001617C:E02 |
| 684 | 40314 | 90.G3.sp6:130933.Seq | M00001619C:F12 |
| 685 | 40044 | 90.H3.sp6:130945.Seq | M00001621C:C08 |
| 686 | 13913 | 90.A4.sp6:130862.Seq | M00001623D:F10 |
| 687 | 3277 | 90.B4.sp6:130874.Seq | M00001624A:B06 |
| 688 | 4309 | 90.C4.sp6:130886.Seq | M00001624C:F01 |
| 689 | 5214 | 90.D4.sp6:130898.Seq | M00001630B:H09 |
| 690 | | 90.E4.sp6:130910.Seq | M00001632D:H07 |
| 691 | 39171 | 90.F4.sp6:130922.Seq | M00001644C:B07 |
| 692 | 19267 | 90.G4.sp6:130934.Seq | M00001645A:C12 |
| 693 | 4665 | 90.H4.sp6:130946.Seq | M00001648C:A01 |
| 694 | | 90.A5.sp6:130863.Seq | M00001651A:H01 |
| 695 | 23201 | 90.B5.sp6:130875.Seq | M00001657D:C03 |
| 696 | 76760 | 90.C5.sp6:130887.Seq | M00001657D:F08 |
| 697 | 23218 | 90.D5.sp6:130899.Seq | M00001662C:A09 |
| 698 | 35702 | 90.E5.sp6:130911.Seq | M00001663A:E04 |
| 699 | 6468 | 90.F5.sp6:130923.Seq | M00001669B:F02 |
| 700 | 14367 | 90.G5.sp6:130935.Seq | M00001670C:H02 |
| 701 | 7015 | 90.H5.sp6:130947.Seq | M00001673C:H02 |
| 702 | 8773 | 90.A6.sp6:130864.Seq | M00001675A:C09 |
| 703 | 11460 | 90.B6.sp6:130876.Seq | M00001676B:F05 |
| 704 | 7570 | 90.D6.sp6:130900.Seq | M00001677D:A07 |
| 705 | 4416 | 90.E6.sp6:130912.Seq | M00001678D:F12 |
| 706 | 6660 | 90.F6.sp6:130924.Seq | M00001679A:A06 |
| 707 | | 90.H6.sp6:130948.Seq | M00001679A:F06 |
| 708 | 26875 | 90.A7.sp6:130865.Seq | M00001679A:F10 |
| 709 | 6298 | 90.B7.sp6:130877.Seq | M00001679B:F01 |
| 710 | 78091 | 90.C7.sp6:130889.Seq | M00001679C:F01 |
| 711 | 10751 | 90.D7.sp6:130901.Seq | M00001679D:D03 |
| 712 | 10539 | 90.F7.sp6:130925.Seq | M00001680D:F08 |
| 713 | 17055 | 90.G7.sp6:130937.Seq | M00001682C:B12 |
| 714 | 5382 | 90.A8.sp6:130866.Seq | M00001688C:F09 |
| 715 | 4393 | 90.B8.sp6:130878.Seq | M00001693C:G01 |
| 716 | 67252 | 90.C8.sp6:130890.Seq | M00001716D:H05 |
| 717 | 40108 | 90.D8.sp6:130902.Seq | M00003741D:C09 |
| 718 | 11476 | 90.E8.sp6:130914.Seq | M00003747D:C05 |
| 719 | | 90.F8.sp6:130926.Seq | M00003754C:E09 |
| 720 | 697 | 90.G8.sp6:130938.Seq | M00003759B:B09 |
| 721 | | 90.H8.sp6:130950.Seq | M00003761D:A09 |
| 722 | 17076 | 90.A9.sp6:130867.Seq | M00003762C:B08 |
| 723 | 3108 | 90.B9.sp6:130879.Seq | M00003763A:F06 |
| 724 | 67907 | 90.C9.sp6:130891.Seq | M00003774C:A03 |
| 725 | | 90.D9.sp6:130903.Seq | M00003784D:D12 |
| 726 | 11350 | 90.F9.sp6:130927.Seq | M00003826B:A06 |
| 727 | 7899 | 90.H9.sp6:130951.Seq | M00003837D:A01 |
| 728 | 7798 | 90.A10.sp6:130868.Seq | M00003839A:D08 |
| 729 | 6539 | 90.B10.sp6:130880.Seq | M00003844C:B11 |
| 730 | 6874 | 90.C10.sp6:130892.Seq | M00003846B:D06 |
| 731 | | 90.D10.sp6:130904.Seq | M00003851B:D08 |
| 732 | 13595 | 90.E10.sp6:130916.Seq | M00003851B:D10 |
| 733 | 5619 | 90.F10.sp6:130928.Seq | M00003853A:D04 |
| 734 | 10515 | 90.G10.sp6:130940.Seq | M00003853A:F12 |
| 735 | 4622 | 90.H10.sp6:130952.Seq | M00003856B:C02 |
| 736 | 3389 | 90.A11.sp6:130869.Seq | M00003857A:G10 |
| 737 | 4718 | 90.B11.sp6:130881.Seq | M00003857A:H03 |
| 738 | | 90.C11.sp6:130893.Seq | M00003867A:D10 |
| 739 | 12977 | 90.F11.sp6:130929.Seq | M00003875B:F04 |
| 740 | 8479 | 90.G11.sp6:130941.Seq | M00003875C:G07 |
| 741 | | 90.H11.sp6:130953.Seq | M00003875D:D11 |
| 742 | 7798 | 90.A12.sp6:130870.Seq | M00003876D:E12 |
| 743 | 5345 | 90.B12.sp6:130882.Seq | M00003879B:C11 |
| 744 | 31587 | 90.C12.sp6:130894.Seq | M00003879B:D10 |
| 745 | 14507 | 90.D12.sp6:130906.Seq | M00003879D:A02 |
| 746 | 13576 | 90.F12.sp6:130930.Seq | M00003885C:A02 |
| 747 | | 90.G12.sp6:130942.Seq | M00003891C:H09 |
| 748 | 9285 | 90.H12.sp6:130954.Seq | M00003906C:E10 |
| 749 | 39809 | 99.A1.sp6:131230.Seq | M00003907D:A09 |
| 750 | 16317 | 99.B1.sp6:131242.Seq | M00003907D:H04 |
| 751 | 8672 | 99.C1.sp6:131254.Seq | M00003909D:C03 |
| 752 | 12532 | 99.D1.sp6:131266.Seq | M00003912B:D01 |
| 753 | 3900 | 99.E1.sp6:131278.Seq | M00003914C:F05 |
| 754 | 23255 | 99.F1.sp6:131290.Seq | M00003922A:E06 |
| 755 | 24488 | 99.C2.sp6:131255.Seq | M00003968B:F06 |
| 756 | 40122 | 99.D2.sp6:131267.Seq | M00003970C:B09 |
| 757 | 23210 | 99.E2.sp6:131279.Seq | M00003974D:E07 |
| 758 | 23358 | 99.F2.sp6:131291.Seq | M00003974D:H02 |
| 759 | 3430 | 99.A3.sp6:131232.Seq | M00003981A:E10 |
| 760 | 2433 | 99.B3.sp6:131244.Seq | M00003982C:C02 |
| 761 | 9105 | 99.C3.sp6:131256.Seq | M00003983A:A05 |
| 762 | 6124 | 99.D3.sp6:131268.Seq | M00004028D:A06 |
| 763 | 40073 | 99.E3.sp6:131280.Seq | M00004028D:C05 |
| 764 | 37285 | 99.H3.sp6:131316.Seq | M00004035C:A07 |
| 765 | 17036 | 99.A4.sp6:131233.Seq | M00004035D:B06 |
| 766 | 3706 | 99.C4.sp6:131257.Seq | M00004068B:A01 |
| 767 | | 99.D4.sp6:131269.Seq | M00004072A:C03 |
| 768 | 15069 | 99.F4.sp6:131293.Seq | M00004081C:D10 |
| 769 | 9285 | 99.H4.sp6:131317.Seq | M00004086D:G06 |
| 770 | 6880 | 99.A5.sp6:131234.Seq | M00004087D:A01 |
| 771 | 5325 | 99.C5.sp6:131258.Seq | M00004093D:B12 |
| 772 | 7221 | 99.D5.sp6:131270.Seq | M00004105C:A04 |
| 773 | 4937 | 99.E5.sp6:131282.Seq | M00004108A:E06 |
| 774 | 6874 | 99.F5.sp6:131294.Seq | M00004111D:A08 |
| 775 | 13183 | 99.G5.sp6:131306.Seq | M00004114C:F11 |
| 776 | | 99.H5.sp6:131318.Seq | M00004121B:G01 |
| 777 | 13272 | 99.A6.sp6:131235.Seq | M00004138B:H02 |
| 778 | 5257 | 99.B6.sp6:131247.Seq | M00004146C:C11 |
| 779 | 6455 | 99.D6.sp6:131271.Seq | M00004157C:A09 |
| 780 | 5319 | 99.E6.sp6:131283.Seq | M00004169C:C12 |
| 781 | 4908 | 99.F6.sp6:131295.Seq | M00004171D:B03 |
| 782 | 11494 | 99.G6.sp6:131307.Seq | M00004172C:D08 |
| 783 | 11443 | 99.A7.sp6:131236.Seq | M00004185C:C03 |
| 784 | | 99.B7.sp6:131248.Seq | M00004191D:B11 |
| 785 | 8210 | 99.C7.sp6:131260.Seq | M00004197D:H01 |
| 786 | 14311 | 99.D7.sp6:131272.Seq | M00004203B:C12 |
| 787 | | 99.E7.sp6:131284.Seq | M00004205D:F06 |
| 788 | 12971 | 99.B8.sp6:131249.Seq | M00004223D:E04 |
| 789 | 6455 | 99.C8.sp6:131261.Seq | M00004229B:F08 |
| 790 | 7212 | 99.D8.sp6:131273.Seq | M00004230B:C07 |
| 791 | 4905 | 99.H8.sp6:131321.Seq | M00004269D:D06 |
| 792 | 16914 | 99.A9.sp6:131238.Seq | M00004275C:C11 |
| 793 | 16921 | 99.D9.sp6:131274.Seq | M00004295D:F12 |
| 794 | 13046 | 99.E9.sp6:131286.Seq | M00004296C:H07 |
| 795 | 9457 | 99.F9.sp6:131298.Seq | M00004307C:A06 |
| 796 | 26295 | 99.G9.sp6:131310.Seq | M00004312A:G03 |
| 797 | 21847 | 99.H9.sp6:131322.Seq | M00004318C:D10 |
| 798 | | 99.H10.sp6:131323.Seq | M00004505D:F08 |
| 799 | | 99.B11.sp6:131252.Seq | M00004692A:H08 |
| 800 | | 99.D11.sp6:131276.Seq | M00005180C:G03 |
| 801 | 39304 | RTA00000118A.j.21.1.Seq_THC151859 | |
| 802 | 2428 | RTA00000123A.l.21.1.Seq_THC205063 | |
| 803 | 1058 | RTA00000126A.e.20.3.Seq_THC217534 | |
| 804 | 5097 | RTA00000134A.k.1.1.Seq_THC215869 | |
| 805 | 20212 | RTA00000134A.l.22.1.Seq_THC128232 | |
| 806 | 23255 | RTA00000177AF.e.14.3.Seq_THC228776 | |
| 807 | 2790 | RTA00000177AF.e.2.1.Seq_THC229461 | |
| 808 | 6420 | RTA00000177AF.f.10.3.Seq_THC226443 | |
| 809 | 4059 | RTA00000177AF.n.18.3.Seq_THC123051 | |
| 810 | | RTA00000179AF.j.13.1.Seq_THC105720 | |
| 811 | 9952 | RTA00000180AF.c.20.1.Seq_THC162284 | |
| 812 | 13238 | RTA00000181AF.m.4.1.Seq_THC140691 | |
| 813 | 9685 | RTA00000183AF.c.11.1.Seq_THC109544 | |
| 814 | | RTA00000183AF.c.24.1.Seq_THC125912 | |
| 815 | 6420 | RTA00000183AF.d.11.1.Seq_THC226443 | |
| 816 | 6974 | RTA00000183AF.d.9.1.Seq_THC223129 | |
| 817 | 40044 | RTA00000183AF.g.22.1.Seq_THC232899 | |
| 818 | | RTA00000183AF.g.9.1.Seq_THC198280 | |
| 819 | 5892 | RTA00000184AF.d.11.1.Seq_THC161896 | |
| 820 | 40044 | RTA00000186AF.d.1.1.Seq_THC232899 | |
| 821 | | RTA00000186AF.h.14.1.Seq_THC112525 | |
| 822 | 19267 | RTA00000186AF.l.12.1.Seq_THC178183 | |
| 823 | 8773 | RTA00000187AF.f.24.1.Seq_THC220002 | |
| 824 | 7570 | RTA00000187AF.g.24.1.Seq_THC168636 | |
| 825 | 11476 | RTA00000187AF.p.19.1.Seq_THC108482 | |
| 826 | | RTA00000188AF.d.11.1.Seq_THC212094 | |
| 827 | 17076 | RTA00000188AF.d.21.1.Seq_THC208760 | |
| 828 | 697 | RTA00000188AF.d.6.1.Seq_THC178884 | |
| 829 | 67907 | RTA00000188AF.g.11.1.Seq_THC123222 | |
| 830 | 5619 | RTA00000188AF.l.9.1.Seq_THC167845 | |
| 831 | 4718 | RTA00000189AF.g.5.1.Seq_THC196102 | |
| 832 | 39809 | RTA00000190AF.e.3.1.Seq_THC150217 | |
| 833 | 23255 | RTA00000190AF.j.4.1.Seq_THC228776 | |
| 834 | 40122 | RTA00000190AF.n.23.1.Seq_THC109227 | |
| 835 | 23210 | RTA00000190AF.o.20.1.Seq_THC207240 | |
| 836 | 23358 | RTA00000190AF.o.21.1.Seq_THC207240 | |
| 837 | 5693 | RTA00000190AF.p.17.2.Seq_THC173318 | |
| 838 | 2433 | RTA00000191AF.a.15.2.Seq_THC79498 | |
| 839 | 5257 | RTA00000192AF.f.3.1.Seq_THC213833 | |
| 840 | 16392 | RTA00000192AF.l.1.1.Seq_THC202071 | |
| 841 | | RTA00000193AF.c.21.1.Seq_THC222602 | |
| 842 | 26295 | RTA00000193AF.i.24.2.Seq_THC197345 | |
| 843 | | RTA00000193AF.m.5.1.Seq_THC173318 | |
| 844 | | RTA00000193AF.n.15.1.Seq_THC215687 | |

[0481] TABLE 2

| | | | | Nearest | | |
|---|---|---|---|---|---|---|
| | | | | Neighbor | | |
| | Nearest | | | (BlastX vs. | | |
| | Neighbor | | | Non- | | |
| | (BlastN vs. | | | Redundant | | |
| SEQ | Genbank) | | P | Proteins) | | P |
| ID | ACCESSION | DESCRIPTION | VALUE | ACCESSION | DESCRIPTION | VALUE |
| 1 | <NONE> | <NONE> | <NONE> | <NONE> | <NONE> | <NONE> |
| 2 | <NONE> | <NONE> | <NONE> | <NONE> | <NONE> | <NONE> |
| 3 | <NONE> | <NONE> | <NONE> | <NONE> | <NONE> | <NONE> |
| 4 | <NONE> | <NONE> | <NONE> | BAR3_CHITE | BALBIANI RING | 1 |
| | | | | | PROTEIN 3 | |
| | | | | | PRECURSOR>PIR2:S08 | |
| | | | | | 167 Balbiani ring 3 | |
| | | | | | protein - midge | |
| | | | | | (Chironomus | |
| | | | | | tentans)>GP:CTBR3_1 | |
| | | | | | C;tentans balbiani ring 3 | |
| | | | | | (BR3) gene | |
| 5 | <NONE> | <NONE> | <NONE> | CYAA_PODAN | ADENYLATE | 1 |
| | | | | | CYCLASE (EC 4.6.1.1) | |
| | | | | | (ATP | |
| | | | | | PYROPHOSPHATE- | |
| | | | | | LYASE) (ADENYLYL | |
| | | | | | CYCLASE)>PIR2:JC47 | |
| | | | | | 47 adenylate cyclase (EC | |
| | | | | | 4.6.1.1) - Podospora | |
| | | | | | anserina>GP:PANADCY_ | |
| | | | | | 1 Podospora anserina | |
| | | | | | adenyl cyclase gene, | |
| | | | | | exons 1-4 | |
| 6 | <NONE> | <NONE> | <NONE> | VP03_HSVSA | PROBABLE | 0.97 |
| | | | | | MEMBRANE | |
| | | | | | ANTIGEN 3 | |
| | | | | | (TEGUMENT | |
| | | | | | PROTEIN)>PIR2:C3680 | |
| | | | | | 6 hypothetical protein | |
| | | | | | ORF3 - saimiriine | |
| | | | | | herpesvirus 1 (strain | |
| | | | | | 11)>GP:HSGEND_3 | |
| | | | | | Herpesvirus saimiri | |
| | | | | | complete genome DNA; | |
| | | | | | ORF 03; similarity to | |
| | | | | | ORF 75 and EBV | |
| | | | | | BNRF1 | |
| 7 | <NONE> | <NONE> | <NONE> | ATFCA2_18 | Arabidopsis thaliana | 0.93 |
| | | | | | DNA chromosome 4, | |
| | | | | | ESSA I contig fragment | |
| | | | | | No; 2; Hydroxyproline- | |
| | | | | | rich glycoprotein | |
| | | | | | homolog; Similarity to | |
| | | | | | hydroxyproline-rich | |
| | | | | | glycoprotein precursor- | |
| | | | | | common tobacco | |
| 8 | <NONE> | <NONE> | <NONE> | DHAL_ASPNG | ALDEHYDE | 0.9 |
| | | | | | DEHYDROGENASE | |
| | | | | | (EC 1.2.1.3) | |
| | | | | | (ALDDH)>GP:ASNALD | |
| | | | | | AA_1 Aspergillus niger | |
| | | | | | aldehyde dehydrogenase | |
| | | | | | (aldA) gene, complete | |
| | | | | | cds | |
| 9 | <NONE> | <NONE> | <NONE> | NCU50264_1 | Neurospora crassa two- | 0.86 |
| | | | | | component histidine | |
| | | | | | kinase (nik-1) gene, 5′ | |
| | | | | | region and partial cds | |
| 10 | <NONE> | <NONE> | <NONE> | NEUG_BOVIN | NEUROGRANIN (P17) | 0.82 |
| | | | | | (B-50 | |
| | | | | | IMMUNOREACTIVE | |
| | | | | | C-KINASE | |
| | | | | | SUBSTRATE) (BICKS) | |
| | | | | | (FRAGMENT)>PIR2:A3 | |
| | | | | | 9034 neurogranin - | |
| | | | | | bovine (fragment) | |
| 11 | <NONE> | <NONE> | <NONE> | HUMBYSTIN_1 | Homo sapiens bystin | 0.81 |
| | | | | | mRNA, complete cds | |
| 12 | <NONE> | <NONE> | <NONE> | BTBMP1_1 | Bos taurus BMP1 gene, | 0.69 |
| | | | | | partial sequence; Bone | |
| | | | | | morphogenetic protein 1 | |
| 13 | <NONE> | <NONE> | <NONE> | TCCYSPROT_1 | T;congolense mRNA for | 0.56 |
| | | | | | (prepro) cysteine | |
| | | | | | proteinase | |
| 14 | <NONE> | <NONE> | <NONE> | P60_LISIV | PROTEIN P60 | 0.15 |
| | | | | | PRECURSOR | |
| | | | | | (INVASION- | |
| | | | | | ASSOCIATED | |
| | | | | | PROTEIN)>GP:LISIAP | |
| | | | | | RELB_1 Listeria | |
| | | | | | ivanovii extracellular | |
| | | | | | protein homologue (iap) | |
| | | | | | gene, complete cds | |
| 15 | <NONE> | <NONE> | <NONE> | HEX_ADE31 | HEXON PROTEIN | 0.15 |
| | | | | | (LATE PROTEIN 2) | |
| | | | | | (FRAGMENT)>PIR2:S3 | |
| | | | | | 7217 hexon protein - | |
| | | | | | human adenovirus 31 | |
| | | | | | (fragment)>GP:HSAT31 | |
| | | | | | H_1 H; sapiens | |
| | | | | | adenovirus type 31 hexon | |
| | | | | | gene; Hexon protein; | |
| | | | | | Internal fragment | |
| | | | | | containing hypervariable | |
| | | | | | regions | |
| 16 | <NONE> | <NONE> | <NONE> | HSU77493_1 | Human Notch2 mRNA, | 0.13 |
| | | | | | partial cds; | |
| | | | | | Transmembrane protein; | |
| | | | | | hN | |
| 17 | <NONE> | <NONE> | <NONE> | CYB_PARTE | CYTOCHROME B (EC | 0.078 |
| | | | | | 1.10.2.2)>PIR2:S07743 | |
| | | | | | cytochrome b - | |
| | | | | | Paramecium tetraurelia | |
| | | | | | mitochondrion | |
| | | | | | (SGC6)>GP:MIPAGEN_{—} | |
| | | | | | 19 Paramecium aurelia | |
| | | | | | mitochondrial complete | |
| | | | | | genome; Apocytochrome | |
| | | | | | b (AA 1-391) | |
| 18 | <NONE> | <NONE> | <NONE> | HUMERB27_1 | Human c-erbB-2 gene, | 0.054 |
| | | | | | exon 7; C-erb-2 protein | |
| 19 | <NONE> | <NONE> | <NONE> | DMTRXIII_2 | D; melanogaster DNA for | 0.047 |
| | | | | | trxI and trxII genes; | |
| | | | | | Trithorax protein trxI; | |
| | | | | | Trithorax; | |
| | | | | | putative>GP:DMTTHOR | |
| | | | | | AX_2 D; melanogaster | |
| | | | | | DNA for (putative) | |
| | | | | | trithorax protein; | |
| | | | | | Predicted trithorax | |
| | | | | | protein | |
| 20 | <NONE> | <NONE> | <NONE> | CELB0281_5 | Caenorhabditis elegans | 0.043 |
| | | | | | cosmid B0281; Similar to | |
| | | | | | reverse transcriptases | |
| 21 | <NONE> | <NONE> | <NONE> | MOTY_VIBPA | SODIUM-TYPE | 0.041 |
| | | | | | FLAGELLAR PROTEIN | |
| | | | | | MOTY | |
| | | | | | PRECURSOR>GP:VPU | |
| | | | | | 06949_4 Vibrio | |
| | | | | | parahaemolyticus BB22 | |
| | | | | | RNase T (rnt) gene and | |
| | | | | | flagellar motor | |
| | | | | | component (motY) gene, | |
| | | | | | complete cds | |
| 22 | <NONE> | <NONE> | <NONE> | A56263 | beta-galactosidase (EC | 0.04 |
| | | | | | 3.2.1.23) isozyme 12 - | |
| | | | | | Arthrobacter sp. (strain | |
| | | | | | B7)>GP:ASU17417_1 | |
| | | | | | Arthrobacter sp; beta- | |
| | | | | | galactosidase gene, | |
| | | | | | complete cds | |
| 23 | <NONE> | <NONE> | <NONE> | GSA_PSEAE | GLUTAMATE-1- | 0.038 |
| | | | | | SEMIALDEHYDE 2,1- | |
| | | | | | AMINOMUTASE (EC | |
| | | | | | 5.4.3.8) (GSA) | |
| | | | | | (GLUTAMATE-1- | |
| | | | | | SEMIALDEHYDE | |
| | | | | | AMINOTRANSFERAS | |
| | | | | | E) (GSA- | |
| | | | | | AT)>PIR2:S57898 | |
| | | | | | glutamate 1- | |
| | | | | | semialdehyde 2,1- | |
| | | | | | aminomutase - | |
| | | | | | Pseudomonas | |
| | | | | | aeruginosa>GP:PAHEM | |
| | | | | | L_1 P; aeruginosa hemL | |
| | | | | | gene; Glutamate 1-sem | |
| 24 | <NONE> | <NONE> | <NONE> | S16323 | hypothetical protein - | 0.035 |
| | | | | | Arabidopsis | |
| | | | | | thalian>GP:ATHB1_1 | |
| | | | | | A; thalian homeobox | |
| | | | | | gene Athb-1 mRNA; | |
| | | | | | Open reading frame | |
| 25 | <NONE> | <NONE> | <NONE> | IRS1_RAT | INSULIN RECEPTOR | 0.027 |
| | | | | | SUBSTRATE- | |
| | | | | | 1>PIR2:S16948 | |
| | | | | | hypothetical protein IRS- | |
| | | | | | 1 - | |
| | | | | | rat>GP:RNIRS1IRM_1 | |
| | | | | | R; Norvegicus IRS-1 | |
| | | | | | mRNA for insulin- | |
| | | | | | receptor; During insulin | |
| | | | | | stimulation, undergoes | |
| | | | | | tyrosine phosphorylation | |
| | | | | | and binds | |
| | | | | | phosphatidylinositol 3- | |
| | | | | | kinase | |
| 26 | <NONE> | <NONE> | <NONE> | CEM02G9_2 | Caenorhabditis elegans | 0.0088 |
| | | | | | cosmid M02G9; | |
| | | | | | M02G9; 1; Similar to | |
| | | | | | keratin like protein; | |
| | | | | | cDNA EST yk308g11; 5 | |
| | | | | | comes from this gene; | |
| | | | | | cDNA EST yk208e11; 5 | |
| | | | | | comes from this gene; | |
| | | | | | cDNA EST yk208e11; 3 | |
| | | | | | comes | |
| 27 | <NONE> | <NONE> | <NONE> | S75490_3 | competence region: | 0.0041 |
| | | | | | iga=IgA protease, | |
| | | | | | comA=transformation | |
| | | | | | competence [Neisseria | |
| | | | | | gonorrhoeae, MS11, | |
| | | | | | Genomic, 3 genes, 2664 | |
| | | | | | nt] | |
| 28 | <NONE> | <NONE> | <NONE> | EXTN_TOBAC | EXTENSIN | 0.0025 |
| | | | | | PRECURSOR (CELL | |
| | | | | | WALL | |
| | | | | | HYDROXYPROLINE- | |
| | | | | | RICH | |
| | | | | | GLYCOPROTEIN)>PIR | |
| | | | | | 2:S06733 | |
| | | | | | hydroxyproline-rich | |
| | | | | | glycoprotein precursor - | |
| | | | | | common | |
| | | | | | tobacco>GP:NTEXT_1 | |
| | | | | | Tobacco HRGPnt3 gene | |
| | | | | | for extensin; Extensin | |
| | | | | | (AA 1-620) | |
| 29 | <NONE> | <NONE> | <NONE> | HPCEGS_1 | Hepatitis C virus | 0.0014 |
| | | | | | complete genome | |
| | | | | | sequence; Polyprotein | |
| 30 | <NONE> | <NONE> | <NONE> | HHVBC_4 | Human hepatitis virus | 0.00093 |
| | | | | | (genotype C, HMA) | |
| | | | | | preS1, preS2, S, C, X, | |
| | | | | | antigens, core antigen, X | |
| | | | | | protein and polymerase | |
| 31 | <NONE> | <NONE> | <NONE> | HSLTGFBP4_1 | Homo sapiens mRNA for | 0.00061 |
| | | | | | latent transforming | |
| | | | | | growth factor-beta | |
| | | | | | binding protein-4; Latent | |
| | | | | | TGF-beta binding | |
| | | | | | protein-4 | |
| 32 | <NONE> | <NONE> | <NONE> | S74909 | transposase - | 0.00051 |
| | | | | | Synechocystis sp. (PCC | |
| | | | | | 6803)>GP:D90909_108 | |
| | | | | | Synechocystis sp; | |
| | | | | | PCC6803 complete | |
| | | | | | genome, 11/27, 1311235- | |
| | | | | | 1430418; Transposase; | |
| | | | | | ORF_ID:slr2062 | |
| 33 | <NONE> | <NONE> | <NONE> | GRN_MOUSE | GRANULINS | 0.00022 |
| | | | | | PRECURSOR | |
| | | | | | (ACROGRANIN)>GP:M | |
| | | | | | USAP_1 Mouse gene for | |
| | | | | | acrogranin precursor, | |
| | | | | | complete cds | |
| 34 | <NONE> | <NONE> | <NONE> | CA21_MOUSE | PROCOLLAGEN | 0.00016 |
| | | | | | ALPHA 2(I) CHAIN | |
| | | | | | PRECURSOR>PIR2:A4 | |
| | | | | | 3291 collagen alpha 2(I) | |
| | | | | | chain precursor - | |
| | | | | | mouse>GP:MMCOL1A2 | |
| | | | | | _1 Mouse COL1A2 | |
| | | | | | mRNA for pro-alpha-2(I) | |
| | | | | | collagen | |
| 35 | <NONE> | <NONE> | <NONE> | MMMHC29N | Mus musculus major | 8.00E−05 |
| | | | | 7_2 | histocompatibility locus | |
| | | | | | class III | |
| | | | | | region:butyrophilin-like | |
| | | | | | protein gene, partial cds; | |
| | | | | | Notch4, PBX2, RAGE, | |
| | | | | | lysophatidic acid acyl | |
| | | | | | transferase-alpha, | |
| | | | | | palmitoyl- | |
| 36 | <NONE> | <NONE> | <NONE> | NFH_RAT | NEUROFILAMENT | 2.40E−05 |
| | | | | | TRIPLET H PROTEIN | |
| | | | | | (200 KD | |
| | | | | | NEUROFILAMENT | |
| | | | | | PROTEIN) (NF-H) | |
| | | | | | (FRAGMENT) | |
| 37 | <NONE> | <NONE> | <NONE> | HUMVWFM_1 | Human von Willebrand | 1.70E−05 |
| | | | | | factor mRNA, 3′ end; | |
| | | | | | Von Willebrand factor | |
| | | | | | prepropeptide | |
| 38 | <NONE> | <NONE> | <NONE> | CGHU2E | collagen alpha 2(XI) | 2.00E−06 |
| | | | | | chain - human (fragment) | |
| 39 | <NONE> | <NONE> | <NONE> | A61183 | hypothetical protein | 4.90E−08 |
| | | | | | (sdsB region) - | |
| | | | | | Pseudomonas sp. | |
| 40 | <NONE> | <NONE> | <NONE> | YM8L_YEAST | HYPOTHETICAL 71.1 | 1.50E−09 |
| | | | | | KD PROTEIN IN DSK2- | |
| | | | | | CAT8 INTERGENIC | |
| | | | | | REGION>PIR2:S54585 | |
| | | | | | hypothetical protein | |
| | | | | | YMR278w - yeast | |
| | | | | | (Saccharomyces | |
| | | | | | cerevisiae)>GP:SC8021 | |
| | | | | | X_4 S; cerevisiae | |
| | | | | | chromosome XIII cosmid | |
| | | | | | 8021; Unknown; | |
| | | | | | YM8021; 04, unknown, | |
| | | | | | len: 622, CAI: 0; 16, | |
| 41 | <NONE> | <NONE> | <NONE> | MTCY210_31 | Mycobacterium | 3.10E−10 |
| | | | | | tuberculosis cosmid | |
| | | | | | Y210; Unknown; | |
| | | | | | MTCY210; 31, unknown, | |
| | | | | | len: 299 aa, slight | |
| | | | | | similarity to | |
| | | | | | carboxykinases | |
| 42 | <NONE> | <NONE> | <NONE> | CEC01G10_5 | Caenorhabditis elegans | 2.30E−12 |
| | | | | | cosmid C01G10, | |
| | | | | | complete sequence; | |
| | | | | | C01G10; 8; CDNA EST | |
| | | | | | CEMSC45R comes from | |
| | | | | | this | |
| | | | | | gene>GP:CEC01G10_5 | |
| | | | | | Caenorhabditis elegans | |
| | | | | | cosmid C01G10; | |
| | | | | | C01G10; 8; CDNA EST | |
| | | | | | CEMSC45R comes from | |
| | | | | | this gene | |
| 43 | <NONE> | <NONE> | <NONE> | HSU15779_1 | Human p70 (ST5) | 9.50E−14 |
| | | | | | mRNA, alternatively | |
| | | | | | spliced, complete cds; | |
| | | | | | Differentially expressed; | |
| | | | | | alternatively spliced | |
| 44 | <NONE> | <NONE> | <NONE> | MTCY210_31 | Mycobacterium | 1.70E−17 |
| | | | | | tuberculosis cosmid | |
| | | | | | Y210; Unknown; | |
| | | | | | MTCY210; 31, unknown, | |
| | | | | | len: 299 aa, slight | |
| | | | | | similarity to | |
| | | | | | carboxykinases | |
| 45 | U61403 | Dictyostelium | 1 | U93472_1 | Danio rerio PPARB | 0.95 |
| | | discoideum PrlA | | | gene, partial cds; Nuclear | |
| | | (prlA) mRNA, | | | receptor C domain | |
| | | partial cds. | | | | |
| 46 | Z92832 | Caenorhabditis | 1 | U93472_1 | Danio rerio PPARB | 0.94 |
| | | elegans DNA *** | | | gene, partial cds; Nuclear | |
| | | SEQUENCING | | | receptor C domain | |
| | | IN PROGRESS | | | | |
| | | *** from clone | | | | |
| | | F31D4; HTGS | | | | |
| | | phase 1. | | | | |
| 47 | L36557 | Oryza sativa | 1 | HSU61262_1 | Human neogenin mRNA, | 0.89 |
| | | (clone pRG3) | | | complete cds | |
| | | repetitive | | | | |
| | | element. | | | | |
| 48 | AF005898 | Homo sapiens | 1 | LRP1_CHICK | LOW-DENSITY | 0.85 |
| | | Na, K-ATPase | | | LIPOPROTEIN | |
| | | beta-3 subunit | | | RECEPTOR-RELATED | |
| | | pseudogene, | | | PROTEIN 1 | |
| | | complete | | | PRECURSOR (LRP) | |
| | | sequence. | | | (ALPHA-2- | |
| | | | | | MACROGLOBULIN | |
| | | | | | RECEPTOR) | |
| | | | | | (A2MR)>PIR2:A53102 | |
| | | | | | LDL receptor-related | |
| | | | | | protein / alpha-2- | |
| | | | | | macroglobulin receptor | |
| | | | | | precursor - | |
| | | | | | chicken>GP:GGLRPA2 | |
| | | | | | MR_1 G; gallus mRNA | |
| | | | | | for LRP/alp | |
| 49 | U18795 | Saccharomyces | 1 | NKC1_SQUAC | BUMETANIDE− | 0.73 |
| | | cerevisiae | | | SENSITIVE SODIUM- | |
| | | chromosome V | | | (POTASSIUM)- | |
| | | cosmids 9669, | | | CHLORIDE | |
| | | 8334, 8199, and | | | COTRANSPORTER 2 | |
| | | lambda clone | | | (NA-K-CL | |
| | | 1160. | | | SYMPORTER)>PIR2:A | |
| | | | | | 53491 bumetanide- | |
| | | | | | sensitive Na-K-C1 | |
| | | | | | cotransporter - spiny | |
| | | | | | dogfish>GP:SANKCC1_{—} | |
| | | | | | 1 Squalus acanthias | |
| | | | | | bumetanide-sensitive Na- | |
| | | | | | K-C1 cotransport protein | |
| | | | | | (NKCC | |
| 50 | AC002523 | Homo sapiens ; | 1 | BXEN_CLOBO | BOTULINUM | 0.71 |
| | | HTGS phase 1, | | | NEUROTOXIN TYPE | |
| | | 54 unordered | | | E, NONTOXIC | |
| | | pieces. | | | COMPONENT>GP:CLO | |
| | | | | | ENT120_1 C; botulinum | |
| | | | | | gene for nontoxic | |
| | | | | | component of progenitor | |
| | | | | | toxin, complete cds | |
| 51 | AC002345 | *** | 1 | P3K2_DICDI | PHOSPHATIDYLINOSI | 0.58 |
| | | SEQUENCING | | | TOL 3-KINASE 2 (EC | |
| | | IN PROGRESS | | | 2.7.1.137) (PI3- | |
| | | *** Genomic | | | KINASE) (PTDINS-3- | |
| | | sequence from | | | KINASE) | |
| | | Human 17; | | | (PI3K)>GP:DDU23477_{—} | |
| | | HTGS phase 1, | | | 1 Dictyostelium | |
| | | 10 unordered | | | discoideum | |
| | | pieces. | | | phosphatidylinositol-4,5- | |
| | | | | | diphosphate 3-kinase | |
| | | | | | (PIK2) mRNA, complete | |
| | | | | | cds | |
| 52 | X14253 | Human mRNA | 1 | I55651 | noradrenaline transporter - | 0.55 |
| | | for cripto protein. | | | | |
| | | | | | bovine>GP:BTU09198_1 | |
| | | | | | Bos taurus noradrenaline | |
| | | | | | transporter mRNA, | |
| | | | | | complete cds | |
| 53 | U23516 | Caenorhabditis | 1 | I69024 | MHC sex-limited protein | 0.47 |
| | | elegans cosmid | | | - mouse | |
| | | B0416. | | | (fragment)>GP:MUSMH | |
| | | | | | C4AD_1 Mouse class III | |
| | | | | | H2-Slp sex-limited | |
| | | | | | protein gene, exons 1, 2 | |
| | | | | | and 3; MHC sex-limited | |
| | | | | | protein | |
| 54 | AB006698 | Arabidopsis | 1 | S81293_1 | L1 {insertion sequence, | 0.25 |
| | | thaliana genomic | | | provirus} [human | |
| | | DNA, | | | papillomavirus type 6b | |
| | | chromosome 5, | | | HPV6b, KP4, Genomic | |
| | | P1 clone: | | | Mutant, 121 nt]; Authors | |
| | | MCL 19. | | | note this reading frame | |
| | | | | | results from a 454 bp | |
| | | | | | deletion and resulting | |
| 55 | K03458 | Human | 1 | S13383 | hydroxyproline-rich | 0.24 |
| | | immunodeficienc | | | glycoprotein - sorghum | |
| | | y virus type 1, | | | | |
| | | isolate Zaire 6, | | | | |
| | | vif, tat, rev, env, | | | | |
| | | nef genes and 3′ | | | | |
| | | LTR. | | | | |
| 56 | B26794 | T1O16TR TAMU | 1 | RK34_PORPU | CHLOROPLAST 50S | 0.021 |
| | | Arabidopsis | | | RIBOSOMAL | |
| | | thaliana genomic | | | PROTEIN | |
| | | clone T1O16. | | | L34>PIR2:S73111 | |
| | | | | | ribosomal protein L34 - | |
| | | | | | red alga (Porphyra | |
| | | | | | purpurea) | |
| | | | | | chloroplast>GP:PPU388 | |
| | | | | | 04_4 Porphyra purpurea | |
| | | | | | chloroplast genome, | |
| | | | | | complete sequence; 50S | |
| | | | | | ribosomal protein L34 | |
| 57 | Z98950 | Human DNA | 1 | D41132 | collagen-related protein 4 | 0.02 |
| | | sequence *** | | | - Hydra magnipapillata | |
| | | SEQUENCING | | | (fragment)>PIR2:S21932 | |
| | | IN PROGRESS | | | mini-collagen - Hydra | |
| | | *** from clone | | | sp.>GP:HSNCOL4_1 | |
| | | 507I15; HTGS | | | Hydra N-COL 4 mRNA | |
| | | phase 1. | | | for mini-collagen; No | |
| | | | | | start codon | |
| 58 | U57057 | Human WD | 1 | DMU15602_1 | Drosophila melanogaster | 0.019 |
| | | protein IR10 | | | (zeste-white 4) mRNA, | |
| | | mRNA, complete | | | complete cds; Similar to | |
| | | cds. | | | C; elegans B0464; 4 gene | |
| | | | | | product, Swiss-Prot | |
| | | | | | Accession Number | |
| | | | | | Q03562 | |
| 59 | U57057 | Human WD | 1 | CR2_MOUSE | COMPLEMENT | 0.0074 |
| | | protein IR10 | | | RECEPTOR TYPE 2 | |
| | | mRNA, complete | | | PRECURSOR (CR2) | |
| | | cds. | | | (COMPLEMENT C3D | |
| | | | | | RECEPTOR)>PIR2:A43 | |
| | | | | | 526 complement | |
| | | | | | C3d/Epstein-Barr virus | |
| | | | | | receptor 2 precursor - | |
| | | | | | mouse>GP:MUSCR2AA | |
| | | | | | _1 Murine complement | |
| | | | | | receptor type 2 (CR2) | |
| | | | | | mRNA, complete cds; | |
| | | | | | Complement receptor | |
| | | | | | type | |
| 60 | B65337 | CIT-HSP- | 1 | A38096 | perlecan precursor - | 0.0051 |
| | | 2021H21.TF | | | human>GP:HUMHSPG2 | |
| | | CIT-HSP Homo | | | B_1 Human heparan | |
| | | sapiens genomic | | | sulfate proteoglycan | |
| | | clone 2021H21. | | | (HSPG2) mRNA, | |
| | | | | | complete cds | |
| 61 | U84722 | Human vascular | 1 | HSTAFII13_1 | H; sapiens mRNA for | 0.0012 |
| | | endothelial | | | TAFII135; Subunit of | |
| | | cadherin mRNA, | | | RNA polymerase II | |
| | | complete cds. | | | transcription factor | |
| | | | | | TFIID | |
| 62 | L41493 | Avian rotavirus | 1 | Y328_MYCPN | HYPOTHETICAL | 0.00015 |
| | | (strain turkey 1) | | | PROTEIN MG328 | |
| | | genomic segment | | | HOMOLOG>PIR2:S736 | |
| | | 4 outer capsid | | | 93 MG328 homolog | |
| | | protein (VP8*) | | | P01_orf1033 - | |
| | | gene. | | | Mycoplasma pneumoniae | |
| | | | | | (ATCC 29342) | |
| | | | | | (SGC3)>GP:MPAE0000 | |
| | | | | | 35_2 Mycoplasma | |
| | | | | | pneumoniae from bases | |
| | | | | | 442306 to 452472 | |
| | | | | | (section 35 of 63) of the | |
| | | | | | complete genome; | |
| | | | | | MG328 homolog, | |
| 63 | D63139 | Aeromonas sp. | 1 | MTCY16B7_3 | Mycobacterium | 6.30E−05 |
| | | gene for | | | tuberculosis cosmid | |
| | | chitinase, | | | SCY16B7; Unknown; | |
| | | complete and | | | MTCY16B7; 03, | |
| | | partial cds. | | | initiation factor, len: 900, | |
| | | | | | similar at C-terminal half | |
| | | | | | to eg IF2_BACSU | |
| | | | | | P17889 initiation factor | |
| | | | | | if-2 (716 aa), fasta | |
| 64 | J04974 | Human alpha-2 | 1 | GDF6_BOVIN | GROWTH/DIFFERENT | 1.00E−05 |
| | | type XI collagen | | | IATION FACTOR GDF- | |
| | | mRNA | | | 6 PRECURSOR | |
| | | (COL11A2). | | | (CARTILAGE− | |
| | | | | | DERIVED | |
| | | | | | MORPHOGENETIC | |
| | | | | | PROTEIN 2) (CDMP-2) | |
| | | | | | (FRAGMENT)>PIR2:B5 | |
| | | | | | 5452 cartilage-derived | |
| | | | | | morphogenetic protein 2 | |
| | | | | | precursor - bovine | |
| | | | | | (fragment)>GP:BTU136 | |
| | | | | | 61_1 Bos taurus | |
| | | | | | cartilage-derived morp | |
| 65 | AC002394 | Homo sapiens | 1 | CELC14F11_6 | Caenorhabditis elegans | 4.60E−06 |
| | | Chromosome 16 | | | cosmid C14F11; Similar | |
| | | BAC clone | | | to aspartate | |
| | | C1T987-SKA- | | | aminotransferase; coded | |
| | | 211C6 ˜complete | | | for by C; elegans cDNA | |
| | | genomic | | | CEMSF95FB; coded for | |
| | | sequence, | | | by C; elegans cDNA | |
| | | complete | | | yk41e4; 3; coded for by | |
| | | sequence. | | | C; elegans | |
| 66 | AB002312 | Human mRNA | 1 | NAT1_YEAST | N-TERMINAL | 1.00E−09 |
| | | for KIAA0314 | | | ACETYLTRANSFERAS | |
| | | gene, partial cds. | | | E 1 (EC 2.3.1.88) | |
| | | | | | (AMINO-TERMINAL, | |
| | | | | | ALPHA- AMINO, | |
| | | | | | ACETYLTRANSFERAS | |
| | | | | | E 1) | |
| 67 | AC003085 | Human BAC | 1 | DP19_CAEEL | DPY-19 | 4.20E−11 |
| | | clone RG094H21 | | | PROTEIN>PIR2:S44629 | |
| | | from 7q21-q22, | | | f22b7.10 protein - | |
| | | complete | | | Caenorhabditis | |
| | | sequence. | | | elegans >GP:CELF22B7_{—} | |
| | | | | | 9 C; aenorhabditis elegans | |
| | | | | | (Bristol N2) cosmid | |
| | | | | | F22B7; Putative | |
| 68 | X55026 | P. anserina | 1 | NAT1_YEAST | N-TERMINAL | 8.40E−12 |
| | | complete | | | ACETYLTRANSFERAS | |
| | | mitochondrial | | | E 1 (EC 2.3.1.88) | |
| | | genome. | | | (AMINO-TERMINAL, | |
| | | | | | ALPHA- AMINO, | |
| | | | | | ACETYLTRANSFERAS | |
| | | | | | E 1) | |
| 69 | Z95399 | Caenorhabditis | 1 | CER06B9_5 | Caenorhabditis elegans | 1.50E−24 |
| | | elegans DNA *** | | | cosmid R06B9, complete | |
| | | SEQUENCING | | | sequence; R06B9; b; | |
| | | IN PROGRESS | | | Protein predicted using | |
| | | *** from clone | | | Genefinder; preliminary | |
| | | Y39B6; HTGS | | | prediction | |
| | | phase 1. | | | | |
| 70 | AC002339 | Arabidopsis | 0.99 | POLG_BVDVS | GENOME | 1 |
| | | thaliana | | | POLYPROTEIN>PIR1: | |
| | | chromosome II | | | A44217 genome | |
| | | BAC T11A07 | | | polyprotein - bovine viral | |
| | | genomic | | | diarrhea virus (strain SD- | |
| | | sequence, | | | 1)>GP:BVDPOLYPRO_{—} | |
| | | complete | | | 1 Bovine viral diarrhea | |
| | | sequence. | | | virus polyprotein RNA, | |
| | | | | | complete cds; Putative | |
| 71 | Y08559 | B. subtilis urease | 0.99 | LRP_CAEEL | LOW-DENSITY | 1 |
| | | operon and | | | LIPOPROTEIN | |
| | | downstream | | | RECEPTOR-RELATED | |
| | | DNA. | | | PROTEIN PRECURSOR | |
| | | | | | (LRP)>PIR2:A47437 | |
| | | | | | LDL-receptor-related | |
| | | | | | protein - Caenorhabditis | |
| | | | | | elegans>GP:CEF29D11_{—} | |
| | | | | | 2 Caenorhabditis elegans | |
| | | | | | cosmid F29D11, | |
| | | | | | complete sequence; | |
| | | | | | F29D11; 1; Protein | |
| | | | | | predicted using Genefi | |
| 72 | U67548 | Methanococcus | 0.99 | YB60_YEAST | HYPOTHETICAL 16.3 | 1 |
| | | jannaschii from | | | KD PROTEIN IN | |
| | | bases 986219 to | | | DUR1, 2-NGR1 | |
| | | 996377 (section | | | INTERGENIC | |
| | | 90 of 150) of the | | | REGION>PIR2:S46084 | |
| | | complete | | | probable membrane | |
| | | genome. | | | protein YBR210w - yeast | |
| | | | | | (Saccharomyces | |
| | | | | | cerevisiae)>GP:SCYBR2 | |
| | | | | | 10W_1 S; cerevisiae | |
| | | | | | chromosome II reading | |
| | | | | | frame ORF YBR210w | |
| 73 | U51645 | Plasmodium | 0.99 | HPSVRPL_1 | Sin Nombre virus (NM | 0.99 |
| | | falciparum | | | H10) RNA L segment | |
| | | cytidine | | | encoding RNA | |
| | | triphosphate | | | polymerase (L protein), | |
| | | synthetase gene, | | | complete cds; Viral RNA | |
| | | complete cds. | | | polymerase (L protein); | |
| | | | | | Putative>GP:HPSVRPL | |
| | | | | | A_1 Sin Nombre virus | |
| | | | | | (NMR11) RNA L | |
| | | | | | segment encoding RNA | |
| | | | | | polymerase (L protein), | |
| | | | | | complete cds; Vir | |
| 74 | Z49889 | Caenorhabditis | 0.99 | MUSHDPRO | Mouse alternatively | 0.021 |
| | | elegans cosmid | | B_1 | spliced HD protein | |
| | | T06H11, | | | mRNA, complete cds | |
| | | complete | | | | |
| | | sequence. | | | | |
| 75 | Z69374 | Human DNA | 0.99 | NCPR_YEAST | NADPH- | 0.017 |
| | | sequence from | | | CYTOCHROME P450 | |
| | | cosmid L174G8, | | | REDUCTASE (EC | |
| | | Huntington's | | | 1.6.2.4) (CPR) | |
| | | Disease Region, | | | | |
| | | chromosome | | | | |
| | | 4p16.3 contains a | | | | |
| | | pair of ESTs. | | | | |
| 76 | Z35847 | S. cerevisiae | 0.99 | CYPA_CAEEL | PEPTIDYL-PROLYL | 0.0044 |
| | | chromosome II | | | CIS-TRANS | |
| | | reading frame | | | ISOMERASE 10 (EC | |
| | | ORF YBL086c. | | | 5.2.1.8) (PPIASE) | |
| | | | | | (ROTAMASE) | |
| | | | | | (CYCLOPHILIN- | |
| | | | | | 10)>GP:CELB0252_4 | |
| | | | | | Caenorhabditis elegans | |
| | | | | | cosmid B0252; Similar to | |
| | | | | | peptidyl-prolyl cis-trans | |
| | | | | | isomerase (PPIASE) | |
| | | | | | (CYCLOPHILIN)>GP:C | |
| | | | | | EU34954_1 | |
| | | | | | Caenorhabditis el | |
| 77 | L35330 | Rattus norvegicus | 0.99 | CELR148_1 | Caenorhabditis elegans | 0.0032 |
| | | glutathione S- | | | cosmid R148; Contains | |
| | | transferase Yb3 | | | similarity to drosophila | |
| | | subunit gene, | | | DNA-binding protein | |
| | | complete cds. | | | K10 (NID:g8148); coded | |
| | | | | | for by C; elegans cDNA | |
| | | | | | yk118e11; 5; coded for by | |
| | | | | | C; elegans cDNA | |
| 78 | Y00324 | Chicken | 0.99 | A56922 | transcription factor shn - | 0.0023 |
| | | vitellogenin gene | | | fruit fly (Drosophila | |
| | | 3′ flanking | | | melanogaster) | |
| | | region. | | | | |
| 79 | M32659 | D. melanogaster | 0.99 | OMU25146_1 | Oncorhynchus mykiss | 0.0017 |
| | | Shab11 protein | | | recombination activating | |
| | | mRNA, complete | | | protein 2 gene, partial | |
| | | cds. | | | cds | |
| 80 | Z69880 | H. sapiens | 0.99 | M84D_DRO | MALE SPECIFIC | 0.0011 |
| | | SERCA3 gene | | ME | SPERM PROTEIN | |
| | | (partial). | | | MST84DD>PIR2:S2577 | |
| | | | | | 5 testis-specific protein | |
| | | | | | Mst84Dd - fruit fly | |
| | | | | | (Drosophila | |
| | | | | | melanogaster)>GP:DMM | |
| | | | | | ST84D_4 | |
| | | | | | D; melanogaster | |
| | | | | | Mst84Da, Mst84Db, | |
| | | | | | Mst84Dc and Mst84Dd | |
| | | | | | genes for put; sperm | |
| | | | | | protein | |
| 81 | M99166 | Escherichia coli | 0.99 | MTU88962_1 | Mycobacterium | 6.50E−07 |
| | | Trp repressor | | | tuberculosis unknown | |
| | | binding protein | | | protein gene, partial cds | |
| | | (wrbA) gene, | | | | |
| | | complete cds. | | | | |
| 82 | X99257 | R. norvegicus | 0.99 | MIU68729_1 | Meloidogyne incognita | 1.60E−09 |
| | | mRNA for lamin | | | cuticle preprocollagen | |
| | | C2. | | | (col-2) mRNA, complete | |
| | | | | | cds; Putative | |
| 83 | AC002432 | Human BAC | 0.98 | 1FMDC | Foot and mouth disease | 0.14 |
| | | clone RG317G18 | | | virus type c-s8c1, chain | |
| | | from 7q31, | | | C - foot and mouth | |
| | | complete | | | disease virus type c-s8c1 | |
| | | sequence. | | | expressed in hamster | |
| | | | | | kidney cells | |
| 84 | Z34799 | Caenorhabditis | 0.98 | MMU57368_1 | Mus musculus EGF | 0.0028 |
| | | elegans cosmid | | | repeat transmembrane | |
| | | F34D10, | | | protein mRNA, complete | |
| | | complete | | | cds; Notch like repeats; | |
| | | sequence. | | | notch 2 | |
| 85 | B15207 | 344E15.TV | 0.98 | POLG_HCVJ6 | GENOME | 0.00083 |
| | | CIT978SKA1 | | | POLYPROTEIN | |
| | | Homo sapiens | | | (CONTAINS: CAPSID | |
| | | genomic clone A- | | | PROTEIN C (CORE | |
| | | 344E15. | | | PROTEIN); MATRIX | |
| | | | | | PROTEIN (ENVELOPE | |
| | | | | | PROTEIN M); MAJOR | |
| | | | | | ENVELOPE PROTEIN | |
| | | | | | E; NONSTRUCTURAL | |
| | | | | | PROTEINS NS1, NS2, | |
| | | | | | NS4A AND NS4B; | |
| | | | | | HELICASE (NS3); | |
| | | | | | RNA-DIRECTED RNA | |
| | | | | | POLYMERASE (EC | |
| | | | | | 2.7.7.48) (NS5))>PI | |
| 86 | AC002412 | *** | 0.98 | KDG1_ARATH | DIACYLGLYCEROL | 0.00024 |
| | | SEQUENCING | | | KINASE 1 (EC | |
| | | IN PROGRESS | | | 2.7.1.107) | |
| | | *** Human | | | (DIGLYCERIDE | |
| | | Chromosome X; | | | KINASE) (DGK 1) | |
| | | HTGS phase 1, 2 | | | (DAG KINASE | |
| | | unordered pieces. | | | 1)>PIR2:S71467 | |
| | | | | | diacylglycerol kinase | |
| | | | | | (EC 2.7.1.107) ATDGK1 | |
| | | | | | - Arabidopsis | |
| | | | | | thaliana>GP:ATHATDG | |
| | | | | | K1_1 Arabidopsis | |
| | | | | | thaliana mRNA for | |
| | | | | | diacylglycerol kinase, | |
| | | | | | complete c | |
| 87 | X57010 | Human COL2A1 | 0.98 | D80005_1 | Human mRNA for | 5.90E−10 |
| | | gene for collagen | | | KIAA0183 gene, partial | |
| | | II alpha 1 chain, | | | cds | |
| | | exons E2-E15. | | | | |
| 88 | M83093 | Neurospora | 0.98 | YA53_SCHPO | HYPOTHETICAL 24.2 | 3.00E−22 |
| | | crassa cAMP- | | | KD PROTEIN | |
| | | dependent protein | | | C13A11.03 IN | |
| | | kinase (cot-1) | | | CHROMOSOME | |
| | | gene, complete | | | I>GP:SPAC13A11_3 | |
| | | cds. | | | S; pombe chromosome I | |
| | | | | | cosmid c13A11; | |
| | | | | | Unknown; | |
| | | | | | SPAC13A11; 03 | |
| | | | | | unknown, len: 210 | |
| 89 | U96271 | Helicobacter | 0.97 | SLMEN6_1 | S; latifolia mRNA for | 0.43 |
| | | pylori heat shock | | | Men-6 | |
| | | protein 70 | | | protein>GP:SLMEN6_1 | |
| | | (hsp70) gene, | | | S; latifolia mRNA for | |
| | | complete cds. | | | Men-6 protein | |
| 90 | U49944 | Caenorhabditis | 0.97 | RON_HUMAN | MACROPHAGE | 0.034 |
| | | elegans cosmid | | | STIMULATING | |
| | | C39E6. | | | PROTEIN RECEPTOR | |
| | | | | | PRECURSOR (EC | |
| | | | | | 2.7.1.112)>PIR2:I38185 | |
| | | | | | protein-tyrosine kinase | |
| | | | | | (EC 2.7.1.112), receptor | |
| | | | | | type ron - | |
| | | | | | human>GP:HSRON_1 | |
| | | | | | H; sapiens RON mRNA | |
| | | | | | for tyrosine kinase; | |
| | | | | | Putative | |
| 91 | Y09255 | B. cereus dnaI | 0.97 | CELT05C1_5 | Caenorhabditis elegans | 0.00043 |
| | | gene, partial. | | | cosmid T05C1; Coded | |
| | | | | | for by C; elegans cDNA | |
| | | | | | yk30f6; 3; coded for by | |
| | | | | | C; elegans cDNA | |
| | | | | | yk34f10; 3 | |
| 92 | AC002413 | *** | 0.96 | CELC44E4_5 | Caenorhabditis elegans | 1 |
| | | SEQUENCING | | | cosmid C44E4; Weak | |
| | | IN PROGRESS | | | similarity to the | |
| | | *** Human | | | drosophila hyperplastic | |
| | | Chromosome X; | | | disc protein | |
| | | HTGS phase 1, 2 | | | (GB:L14644); coded for | |
| | | unordered pieces. | | | by C; elegans cDNA | |
| | | | | | yk49h6; 5; coded for by | |
| | | | | | C; elegans cDNA | |
| 93 | U41625 | Caenorhabditis | 0.96 | HMGC_HUM | HIGH MOBILITY | 1 |
| | | elegans cosmid | | AN | GROUP PROTEIN | |
| | | K03A1. | | | HMGI-C>PIR2:JC2232 | |
| | | | | | high mobility group I-C | |
| | | | | | phosphoprotein - | |
| | | | | | human>GP:HSHMGICG | |
| | | | | | 5_1 Human high- | |
| | | | | | mobility group | |
| | | | | | phosphoprotein isoform | |
| | | | | | I-C (HMGIC) gene, exon | |
| | | | | | 5>GP:HSHMGICP_1 | |
| | | | | | H; sapiens mRNA for | |
| | | | | | HMGI-C | |
| | | | | | protein>GP:HSHMGIC | |
| 94 | Z82202 | Human DNA | 0.96 | YTH3_CAEEL | HYPOTHETICAL 75.5 | 0.73 |
| | | sequence *** | | | KD PROTEIN C14A4.3 | |
| | | SEQUENCING | | | IN CHROMOSOME | |
| | | IN PROGRESS | | | II>GP:CEC14A4_3 | |
| | | *** from clone | | | Caenorhabditis elegans | |
| | | 34P24; HTGS | | | cosmid C14A4, complete | |
| | | phase 1. | | | sequence; C14A4; 3; | |
| | | | | | Weak similarity with a B; | |
| | | | | | Flavum translocation | |
| | | | | | protein (Swiss Prot | |
| | | | | | accession number | |
| | | | | | P38376) | |
| 95 | AL008734 | Human DNA | 0.96 | S25299 | extensin precursor (clone | 0.0004 |
| | | sequence *** | | | Tom L-4) - | |
| | | SEQUENCING | | | tomato>GP:TOMEXTE | |
| | | IN PROGRESS | | | NB_1 L; esculentum | |
| | | *** from clone | | | extensin (class II) gene, | |
| | | 324M8; HTGS | | | complete cds | |
| | | phase 1. | | | | |
| 96 | L15388 | Human G | 0.96 | HUMCOL7A1 | Homo sapiens (clones: | 4.60E−06 |
| | | protein-coupled | | X_1 | CW52-2, CW27-6, | |
| | | receptor kinase | | | CW15-2, CW26-5, 11- | |
| | | (GRK5) mRNA, | | | 67) collagen type VII | |
| | | complete cds. | | | intergenic region and | |
| | | | | | (COL7A1) gene, | |
| | | | | | complete cds | |
| 97 | X97384 | A. thaliana atran3 | 0.95 | <NONE> | <NONE> | <NONE> |
| | | gene. | | | | |
| 98 | M62505 | Human C5a | 0.95 | RIPB₋ BRYDI | RIBOSOME− | 0.83 |
| | | anaphylatoxin | | | INACTIVATING | |
| | | receptor mRNA, | | | PROTEIN BRYODIN | |
| | | complete cds. | | | (RRNA N- | |
| | | | | | GLYCOSIDASE) (EC | |
| | | | | | 3.2.2.22) | |
| | | | | | (FRAGMENT)>PIR2:S1 | |
| | | | | | 6491 rRNA N- | |
| | | | | | glycosidase (EC | |
| | | | | | 3.2.2.22) bryodin - red | |
| | | | | | bryony (fragment) | |
| 99 | D28778 | Cucumber mosaic | 0.95 | POLS_RUBVM | STRUCTURAL | 0.00037 |
| | | virus RNA 1 for | | | POLYPROTEIN | |
| | | 1a, complete | | | (CONTAINS: | |
| | | sequence. | | | NUCLEOCAPSID | |
| | | | | | PROTEIN C; | |
| | | | | | MEMBRANE | |
| | | | | | GLYCOPROTEINS E1 | |
| | | | | | AND | |
| | | | | | E2)>PIR1:GNWVR3 | |
| | | | | | structural polyprotein - | |
| | | | | | rubella virus (strain | |
| | | | | | M33)>GP:TORUB24S_1 | |
| | | | | | Rubella virus 24S | |
| | | | | | subgenomic mRNA for | |
| | | | | | structural proteins E1, E2 | |
| | | | | | and C; | |
| 100 | AF016202 | Homo sapiens | 0.93 | HSU79716_1 | Human reelin (RELN) | 1 |
| | | immunoglobulin | | | mRNA, complete cds | |
| | | heavy chain | | | | |
| | | CDR3 gene, | | | | |
| | | partial cds. | | | | |
| 101 | Z68303 | Caenorhabditis | 0.93 | HS5HT4SAR_1 | H; sapiens mRNA for | 0.87 |
| | | elegans cosmid | | | serotonin 4SA receptor | |
| | | ZK809, complete | | | (5-HT4SA-R) | |
| | | sequence. | | | | |
| 102 | X03049 | E. coli DNA | 0.93 | S37594 | mucin - human | 0.0019 |
| | | sequence 5′ to | | | (fragment) | |
| | | origin of | | | | |
| | | replication oriC. | | | | |
| 103 | M32659 | D. melanogaster | 0.93 | S38480 | nonstructural protein - | 2.30E−06 |
| | | Shab11 protein | | | rubella | |
| | | mRNA, complete | | | virus>GP:RVM33NP_1 | |
| | | cds. | | | Rubella virus M33 RNA | |
| | | | | | for a nonstructural | |
| | | | | | protein; Nonstructural | |
| | | | | | protein genes | |
| 104 | D88687 | Human mRNA | 0.93 | BAT3_HUMAN | LARGE PROLINE− | 8.70E−07 |
| | | for KM-102- | | | RICH PROTEIN BAT3 | |
| | | derived | | | (HLA-B-ASSOCIATED | |
| | | reductase-like | | | TRANSCRIPT | |
| | | factor, complete | | | 3)>PIR2:A35098 MHC | |
| | | cds. | | | class III | |
| | | | | | histocompatibility | |
| | | | | | antigen HLA-B- | |
| | | | | | associated transcript 3 - | |
| | | | | | human>GP:HUMBAT3 | |
| | | | | | A_1 Human HLA-B- | |
| | | | | | associated transcript 3 | |
| | | | | | (BAT3) mRNA, | |
| | | | | | complete | |
| | | | | | cds>GP:HUMBAT3 | |
| 105 | D16847 | Mouse mRNA for | 0.93 | S52796 | prpL2 protein - human | 3.20E−08 |
| | | stromal cell | | | (fragment)>GP:HSPRPL | |
| | | derived protein-1, | | | 2_1 H; sapiens mRNA for | |
| | | complete cds. | | | PRPL-2 protein | |
| 106 | D90915 | Synechocystis sp. | 0.92 | YEK9_YEAST | HYPOTHETICAL 53.9 | 5.90E−05 |
| | | PCC6803 | | | KD PROTEIN IN AFG3- | |
| | | complete | | | SEB2 INTERGENIC | |
| | | genome, 17/27, | | | REGION>PIR2:S50477 | |
| | | 2137259- | | | hypothetical protein | |
| | | 2267259. | | | YER019w - yeast | |
| | | | | | (Saccharomyces | |
| | | | | | cerevisiae)>GP:SCE9537 | |
| | | | | | _20 Saccharomyces | |
| | | | | | cerevisiae chromosome | |
| | | | | | V cosmids 9537, 9581, | |
| | | | | | 9495, 9867, and lambda | |
| | | | | | clone 5898 | |
| 107 | AJ001101 | Mus musculus | 0.92 | DMU58282_1 | Drosophila melanogaster | 3.50E−05 |
| | | mRNA for | | | Bowel (bowl) mRNA, | |
| | | gC1qBP gene. | | | complete cds; | |
| | | | | | Transcription factor; | |
| | | | | | C2H2 zinc finger protein; | |
| | | | | | zinc fingers have | |
| | | | | | extensive sequence | |
| | | | | | similarity to Drosophila | |
| | | | | | odd-skipped | |
| 108 | X57108 | Human gene for | 0.92 | S69032 | hypothetical protein | 4.30E−21 |
| | | cerebroside | | | YPR144c - yeast | |
| | | sulfate activator | | | (Saccharomyces | |
| | | protein, exons 10- | | | cerevisiae)>GP:YSCP96 | |
| | | 14. | | | 59_17 Saccharomyces | |
| | | | | | cerevisiae chromosome | |
| | | | | | XVI cosmid 9659; | |
| | | | | | Ypr144cp; Weak | |
| | | | | | similarity near C- | |
| | | | | | terminus to RNA | |
| | | | | | Polymerase beta subunit | |
| | | | | | (Swiss Prot; accession | |
| | | | | | number P11213) | |
| 109 | D14635 | Caenorhabditis | 0.91 | YM13_YEAST | PUTATIVE ATP- | 0.69 |
| | | elegans DNA for | | | DEPENDENT RNA | |
| | | EMB-5. | | | HELICASE | |
| | | | | | YMR128W>PIR2:S5305 | |
| | | | | | 8 probable membrane | |
| | | | | | protein YMR128w - | |
| | | | | | yeast (Saccharomyces | |
| | | | | | cerevisiae)>GP:SC9553_{—} | |
| | | | | | 4 S; cerevisiae | |
| | | | | | chromosome XIII cosmid | |
| | | | | | 9553; Unknown; | |
| | | | | | YM9553; 04, probable | |
| | | | | | ATP-dependent RNA | |
| | | | | | helicase, len: | |
| 110 | B55500 | CIT-HSP- | 0.91 | U97553_79 | Murine herpesvirus 68 | 0.00016 |
| | | 387J2.TFB CIT- | | | strain WUMS, complete | |
| | | HSP Homo | | | genome; Unknown | |
| | | sapiens genomic | | | | |
| | | clone 387J2. | | | | |
| 111 | X03049 | E. coli DNA | 0.9 | POL_MLVAV | POL POLYPROTEIN | 0.0019 |
| | | sequene 5′ to | | | (PROTEASE (EC | |
| | | origin of | | | 3.4.23.-); REVERSE | |
| | | replication oriC. | | | TRANSCRIPTASE (EC | |
| | | | | | 2.7.7.49); | |
| | | | | | RIBONUCLEASE H | |
| | | | | | (EC | |
| | | | | | 3.1.26.4))>PIR1:GNMV | |
| | | | | | GV pol polyprotein - | |
| | | | | | AKV murine leukemia | |
| | | | | | virus | |
| 112 | U91327 | Human | 0.89 | JC5568 | serine protease (EC 3.4.- | 1 |
| | | chromosome | | | .-) h1 - Serratia | |
| | | 12p15 BAC clone | | | marcescens | |
| | | CIT987SK-99D8 | | | | |
| | | complete | | | | |
| | | sequence. | | | | |
| 113 | X13295 | Rat mRNA for | 0.89 | MNGPOLY_1 | Mengo virus polyprotein | 1 |
| | | alpha-2u | | | genome, complete cds | |
| | | globulin-related | | | withe repeats | |
| | | protein. | | | | |
| 114 | Z78415 | Caenorhabditis | 0.89 | AB000121_1 | Mouse mRNA for | 0.39 |
| | | elegans cosmid | | | TBPIP, complete cds; | |
| | | C17G1, complete | | | TBP1 interacting protein | |
| | | sequence. | | | | |
| 115 | AC002308 | *** | 0.88 | YLK2_CAEEL | HYPOTHETICAL 122.7 | 0.0037 |
| | | SEQUENCING | | | KD PROTEIN D1044.2 | |
| | | IN PROGRESS | | | IN CHROMOSOME | |
| | | *** Human | | | III>GP:CELD1044_4 | |
| | | Chromosome | | | Caenorhabditis elegans | |
| | | 22q11 BAC | | | cosmid D1044 | |
| | | Clone 1000e4; | | | | |
| | | HTGS phase 1, | | | | |
| | | 26 unordered | | | | |
| | | pieces. | | | | |
| 116 | AC002073 | Human PAC | 0.88 | S28499 | probable finger protein - | 1.10E−31 |
| | | clone DJ515N1 | | | rat>GP:RNZFP_1 | |
| | | from 22q11.2- | | | R; norvegicus mRNA for | |
| | | q22, complete | | | putative zinc finger | |
| | | sequence. | | | protein | |
| 117 | Z83848 | Human DNA | 0.87 | NDL_DROME | SERINE PROTEASE | 1 |
| | | sequence *** | | | NUDEL PRECURSOR | |
| | | SEQUENCING | | | (EC 3.4.21.- | |
| | | IN PROGRESS | | | )>PIR2:A57096 nudel | |
| | | *** from clone | | | protein precursor - fruit | |
| | | 57A13; HTGS | | | fly (Drosophila | |
| | | phase 1. | | | melanogaster)>GP:DMU | |
| | | | | | 29153_1 Drosophila | |
| | | | | | melanogaster nudel (ndl) | |
| | | | | | mRNA, complete cds; | |
| | | | | | Serine protease; Soma | |
| | | | | | dependent gene required | |
| | | | | | matern | |
| 118 | U23449 | Caenorhabditis | 0.87 | AF023268_3 | Homo sapiens clk2 | 0.21 |
| | | elegans cosmid | | | kinase (CLK2), propin1, | |
| | | K06A1. | | | cote1, glucocerebrosidase | |
| | | | | | (GBA), and metaxin | |
| | | | | | genes, complete cds; | |
| | | | | | metaxin pseudogene and | |
| | | | | | glucocerebrosidase | |
| | | | | | pseudogene; and | |
| | | | | | thrombospondin3 | |
| | | | | | (THBS3) | |
| 119 | Z68181 | H. vulgaris | 0.87 | RABCY450C | Rabbit cytochrome P-450 | 0.14 |
| | | mRNA for | | _1 | gene, clone pP-450PBc3, | |
| | | elongation factor | | | 3′ end | |
| | | EF1-alpha. | | | | |
| 120 | AC000033 | Homo sapiens | 0.87 | VWF_CANFA | VON WILLEBRAND | 0.036 |
| | | chromosome 9, | | | FACTOR | |
| | | complete | | | PRECURSOR>GP:DOG | |
| | | sequence. | | | VWG_1 Canis familiaris | |
| | | | | | von Willebrand factor | |
| | | | | | mRNA, complete cds | |
| 121 | U23449 | Caenorhabditis | 0.86 | S48988_1 | CRP-1=cystatin-related | 0.64 |
| | | elegans cosmid | | | protein [rats, Wistar | |
| | | K06A1. | | | albino, mRNA Partial, | |
| | | | | | 213 nt]; Cystatin-related | |
| | | | | | protein; Method: | |
| | | | | | conceptual translation | |
| | | | | | supplied by author; This | |
| | | | | | sequence comes from | |
| | | | | | Fig; | |
| 122 | Z89651 | F. rubripes GSS | 0.86 | CPU65981_1 | Cryptosporidium parvum | 0.6 |
| | | sequence, clone | | | P-ATPase gene (CppA- | |
| | | 090I24cD5. | | | E1) gene, complete cds; | |
| | | | | | Putative calcium-ATPase | |
| 123 | Z94055 | Human DNA | 0.86 | GLTB_SYNY3 | FERREDOXIN- | 0.03 |
| | | sequence from | | | DEPENDENT | |
| | | PAC 24M15 on | | | GLUTAMATE | |
| | | chromosome 1. | | | SYNTHASE 1 (EC | |
| | | Contains | | | 1.4.7.1) (FD- | |
| | | tenascin-R | | | GOGAT)>PIR2:S60228 | |
| | | (restrictin), EST. | | | glutamate synthase | |
| | | | | | (ferredoxin) (EC 1.4.7.1) | |
| | | | | | gltB - Synechocystis sp. | |
| | | | | | (PCC | |
| | | | | | 6803)>GP:D90902_66 | |
| | | | | | Synechocystis sp; | |
| | | | | | PCC6803 complete | |
| | | | | | genome, 4/27, 402290- | |
| | | | | | 524345; Gluta | |
| 124 | Z49250 | Human DNA | 0.86 | TRSCAPSID_1 | Tobacco ringspot virus | 3.00E−06 |
| | | sequence from | | | capsid protein gene, | |
| | | cosmid HW2, | | | complete cds | |
| | | Huntington's | | | | |
| | | Disease Region, | | | | |
| | | chromosome | | | | |
| | | 4p16.3. | | | | |
| 125 | Z92855 | Caenorhabditis | 0.84 | AE000809_8 | Methanobacterium | 1 |
| | | elegans DNA *** | | | thermoautotrophicum | |
| | | SEQUENCING | | | from bases 161632 to | |
| | | IN PROGRESS | | | 172569 (section 15 of | |
| | | *** from clone | | | 148) of the complete | |
| | | Y48C3; HTGS | | | genome; Aspartyl- tRNA | |
| | | phase 1. | | | synthetase; Function | |
| | | | | | Code:10; 07 - Metabolism | |
| | | | | | of | |
| 126 | AC002340 | *** | 0.83 | CET01E8_3 | Caenorhabditis elegans | 0.86 |
| | | SEQUENCING | | | cosmid T01E8, complete | |
| | | IN PROGRESS | | | sequence; T01E8; 3; | |
| | | *** Arabidopsis | | | Similar to 1- | |
| | | thaliana ‘TAMU’ | | | phosphatidylinositol-4,5- | |
| | | BAC ‘T11J7’ | | | bisphosphate | |
| | | genomic | | | phosphodiesterase; | |
| | | sequence near | | | cDNA EST CEESG02F | |
| | | marker ‘m283’; | | | comes from this gene; | |
| | | HTGS phase 1, 2 | | | | |
| | | unordered pieces. | | | | |
| 127 | AL008716 | Human DNA | 0.83 | HIVU51189_5 | HIV-1 clone 93th253 | 0.86 |
| | | sequence *** | | | from Thailand, complete | |
| | | SEQUENCING | | | genome; Tat protein | |
| | | IN PROGRESS | | | | |
| | | *** from clone | | | | |
| | | 206C7; HTGS | | | | |
| | | phase 1. | | | | |
| 128 | AC002340 | *** | 0.83 | S60257 | meltrin alpha - | 0.0013 |
| | | SEQUENCING | | | mouse>GP:MUSMAB_1 | |
| | | IN PROGRESS | | | Mouse mRNA for | |
| | | *** Arabidopsis | | | meltrin alpha, complete | |
| | | thaliana ‘TAMU’ | | | cds | |
| | | BAC ‘T11J7’ | | | | |
| | | genomic | | | | |
| | | sequence near | | | | |
| | | marker ‘m283’; | | | | |
| | | HTGS phase 1, 2 | | | | |
| | | unordered pieces. | | | | |
| 129 | Z83848 | Human DNA | 0.82 | ARO1_PNECA | PENTAFUNCTIONAL | 0.0098 |
| | | sequence *** | | | AROM POLYPEPTIDE | |
| | | SEQUENCING | | | (CONTAINS: 3- | |
| | | IN PROGRESS | | | DEHYDROQUINATE | |
| | | *** from clone | | | SYNTHASE (EC | |
| | | 57A13; HTGS | | | 4.6.1.3), 3- | |
| | | phase 1. | | | DEHYDROQUINATE | |
| | | | | | DEHYDRATASE (EC | |
| | | | | | 4.2.1.10) (3- | |
| | | | | | DEHYDROQUINASE), | |
| | | | | | SHIKIMATE 5- | |
| | | | | | DEHYDROGENASE | |
| | | | | | (EC 1.1.1.25), | |
| | | | | | SHIKIMATE KINASE | |
| | | | | | (EC 2.7.1.71), AND | |
| | | | | | EPSP SYNTHASE (E | |
| 130 | AF029308 | Homo sapiens | 0.8 | CELZK84_5 | Caenorhabditis elegans | 2.00E−08 |
| | | chromosome 9 | | | cosmid ZK84; Final exon | |
| | | duplication of the | | | in repeat region; similar | |
| | | T cell receptor | | | to long tandem repeat | |
| | | beta locus and | | | region of sialidase | |
| | | trypsinogen gene | | | (SP:TCNA_TRYCR, | |
| | | families. | | | P23253) and | |
| | | | | | neurofilament H protein; | |
| | | | | | coded for by C; elegans | |
| 131 | AC002458 | Human BAC | 0.78 | IGF2_PIG | INSULIN-LIKE | 0.44 |
| | | clone RG098M04 | | | GROWTH FACTOR II | |
| | | from 7q21-q22, | | | PRECURSOR (IGF- | |
| | | complete | | | II)>GP:SSIGF2_1 | |
| | | sequence. | | | S; scrofa mRNA IGF2 for | |
| | | | | | insulin-like-growth factor | |
| | | | | | 2; Insulin-like-growth | |
| | | | | | factor 2 preproprotein | |
| 132 | Z83843 | Human DNA | 0.78 | PAR51A_1 | P; tetraurelia 51A surface | 0.0014 |
| | | sequence *** | | | protein gene, complete | |
| | | SEQUENCING | | | cds | |
| | | IN PROGRESS | | | | |
| | | *** from clone | | | | |
| | | 368A4; HTGS | | | | |
| | | phase 1. | | | | |
| 133 | X03021 | Human gene for | 0.78 | CEF57B1_3 | Caenorhabditis elegans | 2.20E−05 |
| | | granulocyte- | | | cosmid F57B1, complete | |
| | | macrophage | | | sequence; F57B1; 3; | |
| | | colony | | | Protein predicted using | |
| | | stimulating factor | | | Genefinder; similar to | |
| | | (GM-CSF). | | | collagen | |
| 134 | Z74825 | S. cerevisiae | 0.77 | SYLM_SCHPO | PUTATIVE LEUCYL- | 0.96 |
| | | chromosome XV | | | TRNA SYNTHETASE, | |
| | | reading frame | | | MITOCHONDRIAL | |
| | | ORF YOL083w. | | | PRECURSOR (EC | |
| | | | | | 6.1.1.4) (LEUCINE− | |
| | | | | | TRNA | |
| | | | | | LIGASE)>PIR2:S62486 | |
| | | | | | hypothetical protein | |
| | | | | | SPAC4G8.09 - fission | |
| | | | | | yeast | |
| | | | | | (Schizosaccharomyces | |
| | | | | | pombe)>GP:SPAC4G8_{—} | |
| | | | | | 9 S; pombe chromosome I | |
| | | | | | cosmid c4G8; Unknown; | |
| | | | | | SPAC | |
| 135 | Z74825 | S. cerevisiae | 0.77 | RNU59809_1 | Rattus norvegicus | 0.01 |
| | | chromosome XV | | | mannose 6- | |
| | | reading frame | | | phosphate/insulin-like | |
| | | ORF YOL083w. | | | growth factor II receptor | |
| | | | | | (M6P/IGF2r) mRNA, | |
| | | | | | complete cds; Also | |
| | | | | | termed IGF-II/Man 6-P | |
| | | | | | receptor, MPR, CI-MPR | |
| 136 | U80445 | Caenorhabditis | 0.76 | S28499 | probable finger protein - | 1.10E−31 |
| | | elegans cosmid | | | rat>GP:RNZFP_1 | |
| | | C50F2. | | | R; norvegicus mRNA for | |
| | | | | | putative zinc finger | |
| | | | | | protein | |
| 137 | Z78545 | Caenorhabditis | 0.75 | RRU73586_1 | Rattus norvegicus | 0.023 |
| | | elegans cosmid | | | Fanconi anemia group C | |
| | | M03B6, complete | | | mRNA, complete cds; | |
| | | sequence. | | | Fanconi anemia group C | |
| | | | | | protein; Similar to human | |
| | | | | | FAC protein, GenBank | |
| | | | | | Accession Numbers | |
| | | | | | X66893 and X66894 | |
| 138 | Z97630 | Human DNA | 0.74 | HSMSHREC | H; sapiens mRNA for | 0.036 |
| | | sequence *** | | A_1 | MSH receptor; Author- | |
| | | SEQUENCING | | | given protein sequence is | |
| | | IN PROGRESS | | | in conflict with the | |
| | | *** from clone | | | conceptual translation | |
| | | 466N1; HTGS | | | | |
| | | phase 1. | | | | |
| 139 | AF007269 | Arabidopsis | 0.71 | HSU95090_1 | Homo sapiens | 0.16 |
| | | thaliana BAC | | | chromosome 19 cosmid | |
| | | IG002N01. | | | F19541, complete | |
| | | | | | sequence; F19541_1; | |
| | | | | | Hypothetical (partial) | |
| | | | | | protein similar to proline | |
| | | | | | oxidase | |
| 140 | AC002393 | Mouse | 0.7 | RNLTBP2_1 | Rattus norvegicus mRNA | 4.40E−05 |
| | | BAC284H12 | | | for LTBP-2 like protein; | |
| | | Chromosome 6, | | | Latent TGF- beta binding | |
| | | complete | | | protein-2 like protein | |
| | | sequence. | | | | |
| 141 | B15232 | 344G8.TV | 0.67 | DMSEVL2_2 | Drosophila melanogaster | 0.41 |
| | | CIT978SKA1 | | | sevenless mRNA; Put; | |
| | | Homo sapiens | | | sevenless protein (AA 1 - | |
| | | genomic clone A- | | | 2510) | |
| | | 344G08. | | | | |
| 142 | D13748 | Human mRNA | 0.66 | MMU53563_1 | Mus musculus Brg1 | 0.00016 |
| | | for eukaryotic | | | mRNA, partial cds; N- | |
| | | initiation factor | | | terminal region of the | |
| | | 4AI. | | | protein | |
| 143 | S45791 | band 3-related | 0.66 | POLS_RUBVR | STRUCTURAL | 5.60E−05 |
| | | protein=renal | | | POLYPROTEIN | |
| | | anion exchanger | | | (CONTAINS: | |
| | | AE2 homolog | | | NUCLEOCAPSID | |
| | | [rabbits, New | | | PROTEIN C; | |
| | | Zealand White, | | | MEMBRANE | |
| | | ileal epithelial | | | GLYCOPROTEINS E1 | |
| | | cells, mRNA, | | | AND | |
| | | 3964 nt]. | | | E2)>PIR1:GNWVRA | |
| | | | | | structural polyprotein - | |
| | | | | | rubella virus (strain | |
| | | | | | RA27/3 | |
| | | | | | vaccine)>GP:RUBCE21_{—} | |
| | | | | | 1 Rubella virus RA27/3 | |
| | | | | | RNA for capsid, E2 and | |
| | | | | | E1 proteins; Poly | |
| 144 | M22462 | Chicken protein | 0.66 | HSHP8PROT | H; sapiens mRNA for | 2.00E−06 |
| | | p54 (ets-1) | | _1 | HP8 protein; HP8 | |
| | | mRNA, complete | | | peptide | |
| | | cds. | | | | |
| 145 | U27999 | Human clone | 0.65 | CA18_HUMAN | COLLAGEN ALPHA | 5.70E−06 |
| | | pDEL52A11 | | | 1(VIII) CHAIN | |
| | | HLA-C region | | | PRECURSOR | |
| | | cosmid 52 | | | (ENDOTHELIAL | |
| | | genomic survey | | | COLLAGEN)>PIR2:S15 | |
| | | sequence. | | | 435 collagen alpha | |
| | | | | | 1(VIII) chain precursor - | |
| | | | | | human>GP:HSCOL8A1_{—} | |
| | | | | | 1 Human COL8A1 | |
| | | | | | mRNA for alpha 1(VIII) | |
| | | | | | collagen | |
| 146 | M54787 | N. crassa mating | 0.64 | I50717 | vacuolar H+-ATPase A | 0.0046 |
| | | type a-1 protein | | | subunit - chicken | |
| | | (mt a-1) gene, | | | (fragment)>GP:GGU220 | |
| | | exons 1- 3. | | | 78_1 Gallus gallus | |
| | | | | | vacuolar H+-ATPase A | |
| | | | | | subunit gene, partial cds | |
| 147 | AC002094 | Genomic | 0.63 | PVPVA1_1 | P; vivax pva1 gene | 0.1 |
| | | sequence from | | | | |
| | | Human 17, | | | | |
| | | complete | | | | |
| | | sequence. | | | | |
| 148 | U32701 | Haemophilus | 0.63 | FABG_HAEIN | 3-OXOACYL-[ACYL- | 2.00E−12 |
| | | influenzae from | | | CARRIER PROTEIN] | |
| | | bases 165345 to | | | REDUCTASE (EC | |
| | | 176101 (section | | | 1.1.1.100) (3- | |
| | | 16 of 163) of the | | | KETOACYL-ACYL | |
| | | complete | | | CARRIER PROTEIN | |
| | | genome. | | | REDUCTASE)>PIR2:D6 | |
| | | | | | 4051 3-oxoacyl-[acyl- | |
| | | | | | carrier-protein] reductase | |
| | | | | | (EC 1.1.1.100) - | |
| | | | | | Haemophilus influenzae | |
| | | | | | (strain Rd | |
| | | | | | KW20)>GP:HIU32701_{—} | |
| | | | | | 7 Haemophilus | |
| 149 | Z37159 | T. brucei serum | 0.61 | <NONE> | <NONE> | <NONE> |
| | | resistance | | | | |
| | | associated (SRA) | | | | |
| | | mRNA for VSG- | | | | |
| | | like protein. | | | | |
| 150 | AF027865 | Mus musculus | 0.61 | A56514 | chromokinesin - | 0.045 |
| | | Major | | | chicken>GP:GGU18309 | |
| | | Histocompatibilit | | | _1 Gallus gallus | |
| | | y Locus class II | | | chromokinesin mRNA, | |
| | | region. | | | complete cds | |
| 151 | U40938 | Caenorhabditis | 0.61 | YA53_SCHPO | HYPOTHETICAL 24.2 | 1.90E−24 |
| | | elegans cosmid | | | KD PROTEIN | |
| | | D1009. | | | C13A11.03 IN | |
| | | | | | CHROMOSOME | |
| | | | | | I>GP:SPAC13A11_3 | |
| | | | | | S; pombe chromosome I | |
| | | | | | cosmid c13A11; | |
| | | | | | Unknown; | |
| | | | | | SPAC13A11; 03, | |
| | | | | | unknown, len: 210 | |
| 152 | I16670 | Sequence 1 from | 0.59 | CELF21F8_7 | Caenorhabditis elegans | 0.39 |
| | | patent US | | | cosmids F21F8; Similar to | |
| | | 5476781. | | | eukaryotic aspartyl | |
| | | | | | proteases | |
| 153 | Z84468 | Human DNA | 0.59 | CLG1_YEAST | CYCLIN-LIKE | 0.0015 |
| | | sequence *** | | | PROTEIN | |
| | | SEQUENCING | | | CLG1>PIR2:S37607 | |
| | | IN PROGRESS | | | cyclin-like protein | |
| | | *** from clone | | | YGL215w - yeast | |
| | | 299D3; HTGS | | | (Saccharomyces | |
| | | phase 1. | | | cerevisiae)>GP:SCYGL2 | |
| | | | | | 15W_1 S; cerevisiae | |
| | | | | | chromosome VII reading | |
| | | | | | frame ORF | |
| | | | | | YGL215w>GP:YSCCLG | |
| | | | | | 1CPR_1 Saccharomyces | |
| | | | | | cerevisiae cyclin-like | |
| | | | | | protein (CLG1) gene | |
| 154 | U00054 | Caenorhabditis | 0.57 | <NONE> | <NONE> | <NONE> |
| | | elegans cosmid | | | | |
| | | K07E12. | | | | |
| 155 | M21207 | Synthetic SV40 T | 0.57 | 1CJL2 | cathepsin L (EC | 0.43 |
| | | antigen mutant | | | 3.4.22.15) mutant | |
| | | pseudogene, 3′ | | | (F(78P)L, C25S, T110A, | |
| | | end. | | | E176G, D178G), | |
| | | | | | fragment 2 - human | |
| 156 | AF020282 | Dictyostelium | 0.56 | AC002125_4 | Homo sapiens DNA from | 0.6 |
| | | discoideum | | | chromosome 19-cosmid | |
| | | DG2033 gene, | | | F25965, genomic | |
| | | partial cds. | | | sequence, complete | |
| | | | | | sequence; F25965_5; | |
| | | | | | Hypothetical 35; 3 kDa | |
| | | | | | protein similar to | |
| | | | | | GTPase-activating | |
| | | | | | proteins and orf3 from | |
| 157 | M86352 | Stigmatella | 0.56 | AC002398_4 | Human DNA from | 4.50E−06 |
| | | aurantiaca reverse | | | chromosome 19-specific | |
| | | transcriptase (163 | | | cosmid F25965, genomic | |
| | | RT) gene, | | | sequence, complete | |
| | | complete cds. | | | sequence; F25965_3; | |
| | | | | | Hypothetical 96 kDa | |
| | | | | | human protein similar to | |
| | | | | | alpha chimaerin; | |
| | | | | | Hypothetical | |
| | | | | | protein>GP:AC002398_4 | |
| | | | | | Human DNA from | |
| | | | | | chromosome 19-specific | |
| | | | | | cosmi | |
| 158 | AC003101 | *** | 0.54 | <NONE> | <NONE> | <NONE> |
| | | SEQUENCING | | | | |
| | | IN PROGRESS | | | | |
| | | *** Homo | | | | |
| | | sapiens | | | | |
| | | chromosome 17, | | | | |
| | | clone | | | | |
| | | HRPC41C23; | | | | |
| | | HTGS phase 1, | | | | |
| | | 33 unordered | | | | |
| | | pieces. | | | | |
| 159 | B12117 | F5L15-T7 IGF | 0.54 | CEF32H2_5 | Caenorhabditis elegans | 1 |
| | | Arabidopsis | | | cosmid F32H2, complete | |
| | | thaliana genomic | | | sequence; F32H2; 5; | |
| | | clone F5L15. | | | Similarity to Chicken | |
| | | | | | fatty acid synthase | |
| | | | | | (SW:P12276); cDNA | |
| | | | | | EST yk16c2; 5 comes | |
| | | | | | from this gene; cDNA | |
| | | | | | EST yk113h6; 5 comes | |
| 160 | AE000664 | Mus musculus | 0.54 | CET01G9_6 | Caenorhabditis elegans | 0.84 |
| | | TCR beta locus | | | cosmid T01G9, complete | |
| | | from bases | | | sequence; T01G9; 4; | |
| | | 250554 to 501917 | | | CDNA EST yk29b7; 5 | |
| | | (section 2 of 3) of | | | comes from this gene | |
| | | the complete | | | | |
| | | sequence. | | | | |
| 161 | B12117 | F5L15-T7 IGF | 0.54 | A39718 | nicotinic acetylcholine | 0.27 |
| | | Arabidopsis | | | receptor alpha chain - | |
| | | thaliana genomic | | | marbled electric ray | |
| | | clone F5L15. | | | (fragments) | |
| 162 | Z71261 | Caenorhabditis | 0.5 | KDGE_DRO | EYE−SPECIFIC | 4.60E−05 |
| | | elegans cosmid | | ME | DIACYLGLYCEROL | |
| | | F21C3, complete | | | KINASE (EC 2.7.1.107) | |
| | | sequence. | | | (RETINAL | |
| | | | | | DEGENERATION A | |
| | | | | | PROTEIN) | |
| | | | | | (DIGLYCERIDE | |
| | | | | | KINASE) | |
| | | | | | (DGK)>GP:DRODAGK | |
| | | | | | _1 Fruit fly mRNA for | |
| | | | | | diacylglycerol kinase, | |
| | | | | | complete cds | |
| 163 | M61831 | Human S- | 0.49 | P2C2_ARATH | PROTEIN | 5.60E−08 |
| | | adenosylhomocys | | | PHOSPHATASE 2C (EC | |
| | | teine hydrolase | | | 3.1.3.16) | |
| | | (AHCY) mRNA, | | | (PP2C)>PIR2:S55457 | |
| | | complete cds. | | | phosphoprotein | |
| | | | | | phosphatase (EC | |
| | | | | | 3.1.3.16) 2C - | |
| | | | | | Arabidopsis | |
| | | | | | thaliana>GP:ATHPP2CA | |
| | | | | | _1 Arabidopsis thaliana | |
| | | | | | mRNA for protein | |
| | | | | | phosphatase 2C | |
| 164 | U42608 | Glycine max | 0.48 | <NONE> | <NONE> | <NONE> |
| | | clathrin heavy | | | | |
| | | chain mRNA, | | | | |
| | | complete cds. | | | | |
| 165 | Z93042 | Human DNA | 0.47 | PYRD_BACSU | DIHYDROOROTATE | 0.002 |
| | | sequence *** | | | DEHYDROGENASE | |
| | | SEQUENCING | | | (EC 1.3.3.1) | |
| | | IN PROGRESS | | | (DIHYDROOROTATE | |
| | | *** from clone | | | OXIDASE) | |
| | | 6B17; HTGS | | | (DHODEHASE)>PIR1: | |
| | | phase 1. | | | H39845 dihydroorotate | |
| | | | | | oxidase (EC 1.3.3.1) - | |
| | | | | | Bacillus | |
| | | | | | subtilis>GPN:BSUB000 | |
| | | | | | 9_25 Bacillus subtilis | |
| | | | | | complete genome | |
| | | | | | (section 9 of 21): from | |
| | | | | | 1598421 to 1807200; | |
| 166 | AC000044 | Human | 0.47 | MATK_MAR | PROBABLE INTRON | 0.0011 |
| | | Chromosome | | PO | MATURASE>PIR2:A05 | |
| | | 22q13 Cosmid | | | 034 hypothetical protein | |
| | | Clone p76e10, | | | 370i - liverwort | |
| | | complete | | | (Marchantia polymorpha) | |
| | | sequence. | | | chloroplast>GP:CHMPX | |
| | | | | | X_21 Liverwort | |
| | | | | | Marchantia polymorpha | |
| | | | | | chloroplast genome | |
| | | | | | DNA; ORF370i | |
| 167 | X51508 | Rabbit mRNA for | 0.47 | S45361 | LRR47 protein - fruit fly | 5.30E−07 |
| | | aminopeptidase N | | | (Drosophila | |
| | | (partial). | | | melanogaster)>GP:DML | |
| | | | | | RR47_1 D; melanogaster | |
| | | | | | mRNA for LRR47 | |
| 168 | Z67035 | H. sapiens DNA | 0.45 | JQ2246 | 22.5K cathepsin D | 0.79 |
| | | segment | | | inhibitor protein | |
| | | containing (CA) | | | precursor - | |
| | | repeat; clone | | | potato>GP:POTCATHD | |
| | | AFM323yf1; | | | _1 Potato cathepsin D | |
| | | single read. | | | inhibitor protein mRNA, | |
| | | | | | complete cds | |
| 169 | Z93042 | Human DNA | 0.44 | SMU31768_1 | Schistosoma mansoni | 0.0022 |
| | | sequence *** | | | elastase gene, 3045 bp | |
| | | SEQUENCING | | | clone, complete cds | |
| | | IN PROGRESS | | | | |
| | | *** from clone | | | | |
| | | 6B17; HTGS | | | | |
| | | phase 1. | | | | |
| 170 | L11172 | Plasmodium | 0.43 | HUMPKD1G0 | Homo sapiens polycystic | 1 |
| | | falciparum RNA | | 8_1 | kidney disease (PKD1) | |
| | | polymerase I | | | gene, exons 43-46; | |
| | | gene, complete | | | Polycystic kidney disease | |
| | | cds. | | | 1 protein | |
| 171 | Z95889 | Human DNA | 0.43 | A09811_1 | R; norvegicus mRNA for | 0.00083 |
| | | sequence *** | | | BRL-3A binding protein; | |
| | | SEQUENCING | | | Author-given protein | |
| | | IN PROGRESS | | | sequence is in conflict | |
| | | *** from clone | | | with the conceptual | |
| | | 211A9; HTGS | | | translation | |
| | | phase 1. | | | | |
| 172 | U32772 | Haemophilus | 0.43 | YPT2_CAEEL | HYPOTHETICAL 21.6 | 2.50E−28 |
| | | influenzae from | | | KD PROTEIN F37A4.2 | |
| | | bases 954819 to | | | IN CHROMOSOME | |
| | | 966363 (section | | | III>PIR2:S44639 | |
| | | 87 of 163) of the | | | F37A4.2 protein - | |
| | | complete | | | Caenorhabditis | |
| | | genome. | | | elegans >GP:CELF37A4_{—} | |
| | | | | | 8 Caenorhabditis elegans | |
| | | | | | cosmid F37A4 | |
| 173 | Z99281 | Caenorhabditis | 0.42 | PTU19464_1 | Paramecium tetraurelia | 1 |
| | | elegans cosmid | | | outer arm dynein beta | |
| | | Y57G11C, | | | heavy chain gene, | |
| | | complete | | | complete cds | |
| | | sequence. | | | | |
| 174 | X04571 | Human mRNA | 0.42 | YEK9_YEAST | HYPOTHETICAL 53.9 | 0.99 |
| | | for kidney | | | KD PROTEIN IN AFG3- | |
| | | epidermal growth | | | SEB2 INTERGENIC | |
| | | factor (EGF) | | | REGION>PIR2:S50477 | |
| | | precursor. | | | hypothetical protein | |
| | | | | | YER019w - yeast | |
| | | | | | (Saccharomyces | |
| | | | | | cerevisiae)>GP:SCE9537 | |
| | | | | | _20 Saccharomyces | |
| | | | | | cerevisiae chromosome | |
| | | | | | V cosmids 9537, 9581, | |
| | | | | | 9495, 9867, and lambda | |
| | | | | | clone 5898 | |
| 175 | U32772 | Haemophilus | 0.41 | YPT2_CAEEL | HYPOTHETICAL 21.6 | 7.80E−21 |
| | | influenzae from | | | KD PROTEIN F37A4.2 | |
| | | bases 954819 to | | | IN CHROMOSOME | |
| | | 966363 (section | | | III>PIR2:S44639 | |
| | | 87 of 163) of the | | | F37A4.2 protein - | |
| | | complete | | | Caenorhabditis | |
| | | genome. | | | elegans>GP:CELF37A4_{—} | |
| | | | | | 8 Caenorhabditis elegans | |
| | | | | | cosmid F37A4 | |
| 176 | AC002053 | Human | 0.4 | HSU33837_1 | Human glycoprotein | 1 |
| | | Chromosome | | | receptor gp330 precursor, | |
| | | 9p22 Cosmid | | | mRNA, complete cds | |
| | | Clone 92f5, | | | | |
| | | complete | | | | |
| | | sequence. | | | | |
| 177 | U88309 | Caenorhabditis | 0.4 | DROMTTGN | Drosophila melanogaster | 0.99 |
| | | elegans cosmid | | C_1 | mitochondrial | |
| | | T23B3. | | | cytochrome c oxidase | |
| | | | | | subunit I (COI) gene, 5′ | |
| | | | | | end, Trp-, Cys-, and Tyr- | |
| | | | | | tRNA genes, NADH | |
| | | | | | dehydrogenase subunit 2 | |
| | | | | | (ND2) gene, 3′ end | |
| 178 | M34025 | Human fetal Ig | 0.39 | DNA2_YEAST | DNA REPLICATION | 1 |
| | | heavy chain | | | HELICASE | |
| | | variable region | | | DNA2>PIR2:S48904 | |
| | | (clone M44) | | | probable purine | |
| | | mRNA, partial | | | nucleotide-binding | |
| | | cds. | | | protein YHR164c - yeast | |
| | | | | | (Saccharomyces | |
| | | | | | cerevisiae)>GPN:YSCH9 | |
| | | | | | 986_3 Saccharomyces | |
| | | | | | cerevisiae chromosome | |
| | | | | | VIII cosmid 9986; | |
| | | | | | Dna2p: DNA replication | |
| | | | | | helicase; YHR164C>GP: | |
| 179 | AC002395 | Homo sapiens ; | 0.39 | VV_MUMPE | NONSTRUCTURAL | 0.11 |
| | | HTGS phase 1, | | | PROTEIN V | |
| | | 127 unordered | | | (NONSTRUCTURAL | |
| | | pieces. | | | PROTEIN NS1) | |
| 180 | AC003101 | *** | 0.39 | YLK2_CAEEL | HYPOTHETICAL 122.7 | 0.0001 |
| | | SEQUENCING | | | KD PROTEIN D1044.2 | |
| | | IN PROGRESS | | | IN CHROMOSOME | |
| | | *** Homo | | | III>GP:CELD1044_4 | |
| | | sapiens | | | Caenorhabditis elegans | |
| | | chromosome 17, | | | cosmid D1044 | |
| | | clone | | | | |
| | | HRPC41C23; | | | | |
| | | HTGS phase 1, | | | | |
| | | 33 unordered | | | | |
| | | pieces. | | | | |
| 181 | Z54335 | Human DNA | 0.39 | HUMNFAT3 | Homo sapiens NF-AT3 | 1.60E−06 |
| | | sequence from | | A_1 | mRNA, complete cds | |
| | | cosmid L17A9, | | | | |
| | | Huntington's | | | | |
| | | Disease Region, | | | | |
| | | chromosome | | | | |
| | | 4p16.3. Contains | | | | |
| | | VNTR and a CpG | | | | |
| | | island. | | | | |
| 182 | U95743 | Homo sapiens | 0.38 | CEZC434_6 | Caenorhabditis elegans | 0.18 |
| | | chromosome 16 | | | cosmid ZC434, complete | |
| | | BAC clone | | | sequence; ZC434; 6; | |
| | | CIT987-SK65D3, | | | CDNA EST CEESO02F | |
| | | complete | | | comes from this gene; | |
| | | sequence. | | | cDNA EST CEESS60F | |
| | | | | | comes from this gene | |
| 183 | AC001229 | Sequence of BAC | 0.34 | HSOCAM_1 | H; sapiens mRNA for | 0.051 |
| | | F5I14 from | | | immunoglobulin-like | |
| | | Arabidopsis | | | domain-containing 1 | |
| | | thaliana | | | protein | |
| | | chromosome 1, | | | | |
| | | complete | | | | |
| | | sequence. | | | | |
| 184 | X01703 | Human gene for | 0.33 | NTC3_MOUSE | NEUROGENIC LOCUS | 0.012 |
| | | alpha-tubulin (b | | | NOTCH 3 | |
| | | alpha 1). | | | PROTEIN>PIR2:S45306 | |
| | | | | | notch 3 protein - | |
| | | | | | mouse>GP:MMNOTC_1 | |
| | | | | | M; musculus mRNA for | |
| | | | | | Notch 3 | |
| 185 | Z82189 | Human DNA | 0.31 | LG106_3 | Lemna gibba negatively | 0.27 |
| | | sequence *** | | | light-regulated mRNA | |
| | | SEQUENCING | | | (Lg106); Second longest | |
| | | IN PROGRESS | | | ORF (2) | |
| | | *** from clone | | | | |
| | | 170A21; HTGS | | | | |
| | | phase 1. | | | | |
| 186 | Z98051 | Human DNA | 0.3 | S34960 | NADH dehydrogenase | 0.25 |
| | | sequence *** | | | (ubiquinone) (EC | |
| | | SEQUENCING | | | 1.6.5.3) chain 5 - | |
| | | IN PROGRESS | | | Crithidia oncopelti | |
| | | *** from clone | | | mitochondrion | |
| | | 501A4; HTGS | | | (SGC6)>GP:MICOCNN | |
| | | phase 1. | | | R_3 Crithidia oncopelti | |
| | | | | | mitochondrial ND4, | |
| | | | | | ND5, COI, 12S | |
| | | | | | ribosomal RNA genes for | |
| | | | | | NADH dehydrogenase | |
| | | | | | subunit 4/5, cytochrome | |
| | | | | | oxidase subun | |
| 187 | Z98749 | Human DNA | 0.3 | SCKC_LEIQH | CHARYBDOTOXIN | 0.12 |
| | | sequence *** | | | (CHTX) (CHTX- | |
| | | SEQUENCING | | | LQ1)>PIR2:A60963 | |
| | | IN PROGRESS | | | charybdotoxin 1 - | |
| | | *** from clone | | | scorpion (Leiurus | |
| | | 449O17; HTGS | | | quinquestriatus)>3D:2CR | |
| | | phase 1. | | | D Charybdotoxin (nmr, | |
| | | | | | 12 structures) - scorpion | |
| | | | | | (Leiurus quinquestriatus) | |
| 188 | X96763 | C. albicans | 0.29 | CECC4_1 | Caenorhabditis elegans | 1.30E−17 |
| | | CDC4 gene. | | | cosmid CC4, complete | |
| | | | | | sequence; CC4; a; Protein | |
| | | | | | predicted using | |
| | | | | | Genefinder; preliminary | |
| | | | | | prediction | |
| 189 | U38804 | Porphyra | 0.28 | HIVHCDR3C | Human | 1 |
| | | purpurea | | _1 | immunodeficiency virus | |
| | | chloroplast | | | type 1 heavy-chain | |
| | | genome, | | | complemetarity- | |
| | | complete | | | determining region 3 | |
| | | sequence. | | | mRNA (clone 11), partial | |
| | | | | | cds; Heavy-chain | |
| | | | | | complementarity- | |
| | | | | | determining region 3 | |
| | | | | | (CDR3) from IIIV | |
| | | | | | gp120- | |
| | | | | | >GP:HIVHCDR3I_1 | |
| | | | | | Human | |
| | | | | | immunodeficiency virus | |
| | | | | | type 1 he | |
| 190 | U20657 | Human ubiquitin | 0.28 | HSU20657_1 | Human ubiquitin | 5.60E−12 |
| | | protease (Unph) | | | protease (Unph) proto- | |
| | | proto-oncogene | | | oncogene mRNA, | |
| | | mRNA, complete | | | complete cds | |
| | | cds. | | | | |
| 191 | AC002037 | Human | 0.27 | VRP1_YEAST | VERPROLIN>GP:SCVE | 2.00E−11 |
| | | Chromosome 11 | | | RPRL_1 S; cerevisiae | |
| | | Overlapping | | | (A364) gene for | |
| | | Cosmids | | | verprolin | |
| | | cSRL72g7 and | | | | |
| | | cSRL140b8, | | | | |
| | | complete | | | | |
| | | sequence. | | | | |
| 192 | U58748 | Caenorhabditis | 0.27 | EXLP_TOBAC | PISTIL-SECIFIC | 4.10E−12 |
| | | elegans cosmid | | | EXTENSIN-LIKE | |
| | | ZK180. | | | PROTEIN PRECURSOR | |
| | | | | | (PELP)>PIR2:JQ1696 | |
| | | | | | pistil extensin-like | |
| | | | | | protein precursor (clone | |
| | | | | | pMG 15) - common | |
| | | | | | tobacco>GP:NTPMG15_{—} | |
| | | | | | 1 N; tabacum mRNA for | |
| | | | | | pistil extensin like | |
| | | | | | protein | |
| 193 | Z68013 | Caenorhabditis | 0.26 | <NONE> | <NONE> | <NONE> |
| | | elegans cosmid | | | | |
| | | W02H3, | | | | |
| | | complete | | | | |
| | | sequence. | | | | |
| 194 | AF017042 | Dictyostelium | 0.26 | SPBC31F10_14 | S; pombe chromosome II | 1 |
| | | discoideum LTR- | | | cosmid c31F10; | |
| | | retrotransposon | | | Hypothetical protein; | |
| | | Skipper, partial | | | SPBC31F10; 14c, | |
| | | genomic | | | unknown, len:1586aa, | |
| | | sequence, 5′ end. | | | some similarity eg; to | |
| | | | | | YJR140C, | |
| | | | | | YJ9H_YEAST, P47171, | |
| | | | | | involved in cell cycle | |
| | | | | | regulation | |
| 195 | B03174 | cSRL-16e2-u | 0.26 | CELC30E1_7 | Caenorhabditis elegans | 0.38 |
| | | cSRL flow sorted | | | cosmid C30E1 | |
| | | Chromosome 11 | | | | |
| | | specific cosmid | | | | |
| | | Homo sapiens | | | | |
| | | genomic clone | | | | |
| | | cSRL-16e2. | | | | |
| 196 | X70810 | E. gracilis | 0.25 | CEK10H10_8 | Caenorhabditis elegans | 0.98 |
| | | chloroplast | | | cosmid K10H10, | |
| | | complete | | | complete sequence; | |
| | | genome. | | | K10H10; k; Protein | |
| | | | | | predicted using | |
| | | | | | Genefinder; preliminary | |
| | | | | | prediction | |
| 197 | U80024 | Caenorhabditis | 0.25 | MMAF001794 | Mus musculus Treacher | 0.017 |
| | | elegans cosmid | | _1 | Collins Syndrome protein | |
| | | C18B10. | | | (Tcof1) mRNA, | |
| | | | | | complete cds; Putative | |
| | | | | | nucleolar | |
| | | | | | phosphoprotein; similar | |
| | | | | | to Homo sapiens | |
| | | | | | Treacher Collins | |
| | | | | | syndrome TCOF1 protein | |
| | | | | | encoded>GP:MMAF001 | |
| | | | | | 794_1 Mus musculus | |
| | | | | | Treacher Collins | |
| | | | | | Syndrome p | |
| 198 | AC000591 | Drosophila | 0.25 | YHGE_ECOLI | HYPOTHETICAL 64.6 | 0.00068 |
| | | melanogaster | | | KD PROTEIN IN | |
| | | (subclone 9_g3 | | | MRCA-PCKA | |
| | | from P1 DS01486 | | | INTERGENIC REGION | |
| | | (D32)) DNA | | | (F574)>PIR2:E65135 | |
| | | sequence, | | | hypothetical 64.6 kD | |
| | | complete | | | protein in mrcA-pckA | |
| | | sequence. | | | intergenic region - | |
| | | | | | Escherichia coli (strain | |
| | | | | | K- | |
| | | | | | 12)>GP:ECAE000415_7 | |
| | | | | | Escherichia coli, mrcA, | |
| | | | | | yrfE, yrfF, yrfG, yrfH, | |
| | | | | | yrfI | |
| 199 | AC000591 | Drosophila | 0.25 | YHGE_ECOLI | HYPOTHETICAL 64.6 | 0.00068 |
| | | melanogaster | | | KD PROTEIN IN | |
| | | (subclone 9_g3 | | | MRCA-PCKA | |
| | | from P1 DS01486 | | | INTERGENIC REGION | |
| | | (D32)) DNA | | | (F574)>PIR2:E65135 | |
| | | sequence, | | | hypothetical 64.6 kD | |
| | | complete | | | protein in mrcA-pckA | |
| | | sequence. | | | intergenic region - | |
| | | | | | Escherichia coli (strain | |
| | | | | | K- | |
| | | | | | 12)>GP:ECAE000415_7 | |
| | | | | | Escherichia coli, mrcA, | |
| | | | | | yrfE, yrfF, yrfG, yrfH, | |
| | | | | | yrfI | |
| 200 | Z99571 | Human DNA | 0.24 | YA53_SCHPO | HYPOTHETICAL 24.2 | 0.017 |
| | | sequence *** | | | KD PROTEIN | |
| | | SEQUENCING | | | C13A11.03 IN | |
| | | IN PROGRESS | | | CHROMOSOME | |
| | | *** from clone | | | I>GP:SPAC13A11_3 | |
| | | 388N15; HTGS | | | S; pombe chromosome I | |
| | | phase 1. | | | cosmid c13A11; | |
| | | | | | Unknown; | |
| | | | | | SPAC13A11; 03, | |
| | | | | | unknown, len: 210 | |
| 201 | U00672 | Human | 0.24 | TFDP00900 | - Polypeptides entry for | 1.00E−05 |
| | | interleukin-10 | | | factor Oct-2.5 | |
| | | receptor mRNA, | | | | |
| | | complete cds. | | | | |
| 202 | AC003061 | *** | 0.23 | CG1_HUMAN | CG1 | 0.00078 |
| | | SEQUENCING | | | PROTEIN>GP:HSU4602 | |
| | | IN PROGRESS | | | 3_1 Human Xq28 | |
| | | *** Mouse | | | mRNA, complete cds; | |
| | | Chromosome 6 | | | Orf | |
| | | BAC clone | | | | |
| | | b245c12; HTGS | | | | |
| | | phase 2, 8 | | | | |
| | | ordered pieces. | | | | |
| 203 | AF009420 | Homo sapiens | 0.22 | PN0675 | collagen alpha 1(X VIII) | 0.00072 |
| | | microsatellite | | | chain - mouse | |
| | | sequence in the | | | (fragment)>GP:MUSCO | |
| | | HNF3a gene. | | | LLAG_1 Mouse mRNA | |
| | | | | | for collagen, partial cds | |
| 204 | B18861 | F20C18-Sp6 IGF | 0.22 | TFDP00659 | - Polypeptides entry for | 0.0003 |
| | | Arabidopsis | | | factor PR | |
| | | thaliangenomic | | | | |
| | | clone F20C18. | | | | |
| 205 | U00672 | Human | 0.22 | TFDP00900 | - Polypeptides entry for | 1.00E−05 |
| | | interleukin-10 | | | factor Oct-2.5 | |
| | | receptor mRNA, | | | | |
| | | complete cds. | | | | |
| 206 | X52105 | Dictyostelium | 0.18 | <NONE> | <NONE> | <NONE> |
| | | discoideum SP60 | | | | |
| | | gene for spore | | | | |
| | | coat protein. | | | | |
| 207 | L07628 | Saccharopolyspor | 0.17 | D88764_1 | Rana catesbeiana mRNA | 0.00021 |
| | | a erythraea | | | for alpha 2 type I | |
| | | insertion | | | collagen, complete cds | |
| | | sequence IS1136, | | | | |
| | | copy B, 3′ end. | | | | |
| 208 | Z49631 | S. cerevisiae | 0.16 | YSCDAL1A_1 | Saccharomyces | 1 |
| | | chromosome X | | | cerevisiae alantoinase | |
| | | reading frame | | | (DAL1) gene, complete | |
| | | ORF YJR131w. | | | cds | |
| 209 | Z87893 | F. rubripes GSS | 0.16 | CELC27A12_8 | Caenorhabditis elegans | 1.30E−07 |
| | | sequence, clone | | | cosmid C27A12; Partial | |
| | | 043C17aB8. | | | CDS; this gene begins in | |
| | | | | | the neighboring clone; | |
| | | | | | coded for by C; elegans | |
| | | | | | cDNA yk127f1; 3; coded | |
| | | | | | for by C; elegans cDNA | |
| | | | | | yk127f1; 5 | |
| 210 | U92852 | Rhoiptelea | 0.15 | SEU40259_5 | Staphyloccous | 0.95 |
| | | chiliantha | | | epidermidis trimethoprim | |
| | | maturase (matK) | | | resistance plasmid | |
| | | gene, chloroplast | | | pSK639; Orf53 | |
| | | gene encoding | | | | |
| | | chloroplast | | | | |
| | | protein, complete | | | | |
| | | cds. | | | | |
| 211 | X62620 | B. mori Abd-A | 0.15 | ATAP22_36 | Arabidopsis thaliana | 0.75 |
| | | gene homeobox. | | | DNA chromosome 4, | |
| | | | | | ESSA 1 AP2 contig | |
| | | | | | fragment No; 2; | |
| | | | | | Hypothetical protein; | |
| | | | | | Similarity to NADH | |
| | | | | | dehydrogenase, | |
| | | | | | Chondrus crispus; | |
| | | | | | MNOS:S59107 | |
| 212 | J02079 | epstein-barr virus | 0.15 | A38346 | ultra-high-sulfur keratin | 7.50E−05 |
| | | simple repeat | | | 1 - | |
| | | array (ir3). | | | mouse>GP:MUSSER1_1 | |
| | | | | | Mouse serine 1 ultra high | |
| | | | | | sulfur protein gene, | |
| | | | | | complete cds; Putative | |
| 213 | M35027 | Vaccinia virus, | 0.14 | MTF1_FUSNU | MODIFICATION | 0.87 |
| | | complete | | | METHYLASE FNUDI | |
| | | genome. | | | (EC 2.1.1.73) | |
| | | | | | (CYTOSINE−SPECIFIC | |
| | | | | | METHYLTRANSFERA | |
| | | | | | SE FNUDI) (M. FNUDI) | |
| 214 | AC003058 | *** | 0.14 | HEXA_DICDI | BETA- | 0.006 |
| | | SEQUENCING | | | HEXOSAMINIDASE | |
| | | IN PROGRESS | | | ALPHA CHAIN | |
| | | *** Arabidopsis | | | PRECURSOR (EC | |
| | | thaliana ‘IGF’ | | | 3.2.1.52) (N-ACETYL- | |
| | | BAC ‘F27F23’ | | | BETA- | |
| | | genomic | | | GLUCOSAMINIDASE) | |
| | | sequence near | | | (BETA-N- | |
| | | marker | | | ACETYLHEXOSAMINI | |
| | | ‘CIC06E08’; | | | DASE)>PIR2:A30766 | |
| | | HTGS phase 1, 8 | | | beta-N- | |
| | | unordered pieces. | | | acetylhexosaminidase | |
| | | | | | (EC 3.2.1.52) A | |
| | | | | | precursor - slime mold | |
| | | | | | (Dictyostelium | |
| | | | | | discoideum)>GP:DDINA | |
| | | | | | GA_1 D; d | |
| 215 | AC001229 | Sequence of BAC | 0.13 | A49281 | pol protein - simian T- | 0.77 |
| | | F5I14 from | | | cell lymphotropic virus | |
| | | Arabidopsis | | | type 1, STLV-1 (isolate | |
| | | thaliana | | | Bab34) | |
| | | chromosome 1, | | | (fragment)>GP:STVBAB | |
| | | complete | | | POLA_1 Simian T-cell | |
| | | sequence. | | | leukemia virus PCR | |
| | | | | | derived (pol) gene, | |
| | | | | | partial sequence | |
| | | | | | BAB34POL; Bases | |
| | | | | | 4779-4918 EMBL ATK | |
| | | | | | numbering system; | |
| | | | | | BAB34POL | |
| 216 | U46067 | Capra hircus | 0.12 | S70663 | lectin heavy chain, N- | 0.8 |
| | | beta-mannosidase | | | acetylgalactosamine− | |
| | | mRNA, complete | | | specific - Entamoeba | |
| | | cds. | | | histolytica | |
| | | | | | (fragment)>GP:EHU334 | |
| | | | | | 43_1 Entamoeba | |
| | | | | | histolytica GalNAc lectin | |
| | | | | | heavy subunit (hgl4) | |
| | | | | | gene, partial cds; N- | |
| | | | | | acetylgalactosamine | |
| | | | | | adherence lectin heavy | |
| | | | | | subunit | |
| 217 | AC000380 | *** | 0.12 | ATFCA8_19 | Arabidopsis thaliana | 0.64 |
| | | SEQUENCING | | | DNA chromosome 4, | |
| | | IN PROGRESS | | | ESSA I contig fragment | |
| | | *** Human | | | No; 8; Unnamed protein | |
| | | Chromosome 3 | | | product | |
| | | pac pDJ70i11; | | | | |
| | | HTGS phase 1, 2 | | | | |
| | | unordered pieces. | | | | |
| 218 | X61207 | A. brasilense | 0.12 | OCCLO2_1 | O; circumcincta colost-2 | 0.0074 |
| | | hisB, H, A, F | | | gene; Cuticular collagen | |
| | | and E genes for | | | | |
| | | imidazole | | | | |
| | | glycerolphosphat | | | | |
| | | e dehydratase, | | | | |
| | | glutamine | | | | |
| | | amidotransferase, | | | | |
| | | phosphorybosilfo | | | | |
| | | rmimino-5- | | | | |
| | | amino- | | | | |
| | | phosphorybosil- | | | | |
| | | 4- | | | | |
| | | imidazolecarboxa | | | | |
| | | mide isomerase, | | | | |
| | | cyclase and | | | | |
| | | phosphorybosil- | | | | |
| | | AMP- | | | | |
| | | cyclohydrolase. | | | | |
| 219 | AF014259 | HIV-1 Patient | 0.11 | DMU88570_1 | Drosophila melanogaster | 1 |
| | | 1088 from | | | CREB-binding protein | |
| | | Edinburgh, MA- | | | homolog mRNA, | |
| | | p17 (gag) gene, | | | complete cds; CBP | |
| | | partial cds. | | | | |
| 220 | AC000636 | Drosophila | 0.11 | A64829 | hypothetical protein in | 0.051 |
| | | melanogaster | | | dmsC 3′ region- | |
| | | (subclone 2_c11 | | | Escherichia coli (strain | |
| | | from P1 DS07660 | | | K- | |
| | | (D44)) DNA | | | 12)>GP:ECAE000192_1 | |
| | | sequence, | | | Escherichia coli, ycaD, | |
| | | complete | | | ycaK, pflA, pflB, focA | |
| | | sequence. | | | genes from bases 944908 | |
| | | | | | to 955952 (section 82 of | |
| | | | | | 400) of the complete | |
| | | | | | genome; Hypothetical | |
| | | | | | protein in dmsC | |
| 221 | AC002428 | Human BAC | 0.11 | HSNMYC2_1 | Human N-myc gene exon | 0.00014 |
| | | clone GS039E22 | | | 2; Put; N-myc protein (aa | |
| | | from 5q31, | | | 1-263) (953 is 1st base in | |
| | | complete | | | codon) | |
| | | sequence. | | | | |
| 222 | L40949 | Homo sapiens | 0.11 | CEUNC93_2 | C; elegans unc-93 gene; | 1.20E−13 |
| | | (clone AT7-5eu) | | | Protein 2 | |
| | | opioid-receptor- | | | | |
| | | like protein | | | | |
| | | mRNA, 5′ end. | | | | |
| 223 | AL008636 | Human DNA | 0.1 | XELCOL2A1 | Xenopus laevis alpha-1 | 2.60E−06 |
| dir | | sequence *** | | A_1 | collagen type II′ mRNA, | |
| | | SEQUENCING | | | complete cds; Alpha-1 | |
| | | IN PROGRESS | | | type II′ collagen | |
| | | *** from clone | | | | |
| | | 722E9; HTGS | | | | |
| | | phase 1. | | | | |
| 224 | D86993 | Human (lambda) | 0.1 | CELM02B7_2 | Caenorhabditis elegans | 1.80E−09 |
| | | DNA for | | | cosmid M02B7 | |
| | | immunoglobulin | | | | |
| | | light chain. | | | | |
| 225 | AC002539 | Homo sapiens | 0.098 | MTCY7D11_{—} | Mycobacterium | 0.026 |
| | | chromosome 17, | | 17 | tuberculosis cosmid | |
| | | clone 195o20, | | | Y7D11; Unknown; | |
| | | complete | | | MTCY07D11; 17c; | |
| | | sequence. | | | unknown, len: 186 aa, | |
| | | | | | FASTA best: Q10390 | |
| | | | | | Y009_MYCTU | |
| | | | | | hypothetical 31; 0 KD | |
| | | | | | protein MTCY190; 09C | |
| | | | | | (299 aa) opt: 355 z-score: | |
| | | | | | 316; 8 | |
| 226 | M88165 | Human inter- | 0.096 | A54161 | ryanodine−binding | 1 |
| | | alpha-trypsin | | | protein alpha form- | |
| | | inhibitor light | | | bullfrog>GP:D21070_1 | |
| | | chain (ITI) gene, | | | Rana catesbeiana mRNA | |
| | | exon 1. | | | for bullfrog skeletal | |
| | | | | | muscle calcium release | |
| | | | | | channel (ryanodine | |
| | | | | | receptor) alpha | |
| | | | | | isoform(RyR1), complete | |
| | | | | | cds; Ryanodine receptor | |
| | | | | | alpha isoform | |
| 227 | Z92851 | Caenorhabditis | 0.082 | CYA7_BOVIN | ADENYLATE | 0.3 |
| | | elegans DNA *** | | | CYCLASE, TYPE VII | |
| | | SEQUENCING | | | (EC 4.6.1.1) (ATP | |
| | | IN PROGRESS | | | PYROPHOSPHATE− | |
| | | *** from clone | | | LYASE) (ADENYLYL | |
| | | Y39G8; HTGS | | | CYCLASE) | |
| | | phase 1. | | | | |
| 228 | L00638 | Arabidopsis | 0.072 | NUCM_TRY | NADH-UBIQUINONE | 0.24 |
| | | thaliana ubiquitin | | BB | OXIDOREDUCTASE | |
| | | conjugating | | | 49 KD SUBUNIT | |
| | | enzyme exons 2- | | | HOMOLOG (EC 1.6.5.3) | |
| | | 4. | | | (NADH | |
| | | | | | DEHYDROGENASE | |
| | | | | | SUBUNIT 7 | |
| | | | | | HOMOLOG)>PIR2:A35 | |
| | | | | | 693 NADH | |
| | | | | | dehydrogenase (EC | |
| | | | | | 1.6.99.3) chain 7- | |
| | | | | | Trypanosoma brucei | |
| | | | | | mitochondrion (SGC6) | |
| 229 | U49169 | Dictyostelium | 0.071 | MMU65594_1 | Mus musculus Brca2 | 1 |
| | | discoideum V- | | | mRNA, complete cds; | |
| | | ATPase A | | | Similar to human breast | |
| | | subunit (vatA) | | | cancer susceptibility gene | |
| | | mRNA, complete | | | BRCA2; Allele: wild | |
| | | cds. | | | type; putative tumor | |
| | | | | | suppressor | |
| 230 | AF001549 | Homo sapiens | 0.07 | PM22_HUMAN | PERIPHERAL MYELIN | 0.0078 |
| | | chromosome 16 | | | PROTEIN 22 (PMP- | |
| | | BAC clone | | | 22)>PIR2:JN0503 | |
| | | CIT987SK- | | | peripheral myelin protein | |
| | | 270G1 complete | | | 22- | |
| | | sequence. | | | human>GP:HUMGAS3 | |
| | | | | | X_1 Human peripheral | |
| | | | | | myelin protein 22 | |
| | | | | | (GAS3) mRNA, | |
| | | | | | complete | |
| | | | | | cds>GP:HUMPMP22_1 | |
| | | | | | Human peripheral myelin | |
| | | | | | protein 22 mRNA, | |
| | | | | | complete | |
| | | | | | cds>GP:HUMPMP22 | |
| 231 | L36829 | Mus musculus | 0.066 | <NONE> | <NONE> | <NONE> |
| | | alphaA-crystallin- | | | | |
| | | binding protein I | | | | |
| | | (AlphaA- | | | | |
| | | CRYBP1) gene, | | | | |
| | | complete cds. | | | | |
| 232 | AC000159 | *** | 0.058 | CEZK863_1 | Caenorhabditis elegans | 1 |
| | | SEQUENCING | | | cosmid ZK863, complete | |
| | | IN PROGRESS | | | sequence; ZK863; 2; | |
| | | *** Human BAC | | | Similar to collagen | |
| | | Clone 11q13; | | | | |
| | | HTGS phase 1, | | | | |
| | | 10 unordered | | | | |
| | | pieces. | | | | |
| 233 | AC000159 | *** | 0.058 | CAC2_HAECO | CUTICLE COLLAGEN | 1.20E−08 |
| | | SEQUENCING | | | 2C | |
| | | IN PROGRESS | | | (FRAGMENT)>GP:HAE | |
| | | *** Human BAC | | | COL2C_1 H; contortus | |
| | | Clone 11q13; | | | collagen 2C mRNA, | |
| | | HTGS phase 1, | | | 3′ end | |
| | | 10 unordered | | | | |
| | | pieces. | | | | |
| 234 | Z23908 | H. sapiens | 0.057 | VEU34999_1 | Venezuelan equine | 0.0002 |
| | | (D5S630) DNA | | | encephalitis virus | |
| | | segment | | | nonstructural and | |
| | | containing (CA) | | | structural polyprotein | |
| | | repeat; clone | | | genes, complete cds; | |
| | | AFM268zd9; | | | Nonstructural | |
| | | single read. | | | polyprotein; Internal stop | |
| | | | | | codon, readthrough | |
| | | | | | occurs 5% of the time | |
| 235 | B21875 | T3E8-Sp6 TAMU | 0.055 | YRR2_CAEEL | HYPOTHETICAL 91.1 | 0.68 |
| | | Arabidopsis | | | KD PROTEIN R144.2 | |
| | | thaliana genomic | | | IN CHROMOSOME | |
| | | clone T3E8. | | | III>GP:CELR144_7 | |
| | | | | | Caenorhabditis elegans | |
| | | | | | cosmid R144; Coded for | |
| | | | | | by C; elegans cDNA | |
| | | | | | CEESP84R; coded for by | |
| | | | | | C; elegans cDNA | |
| | | | | | yk23c4; 5; coded for by | |
| | | | | | C; elegans cDNA | |
| | | | | | yk44f9; 5; coded for by | |
| | | | | | C; eleg | |
| 236 | Z98303 | Human DNA | 0.048 | AC002330_3 | Arabidopsis thaliana | 0.99 |
| | | sequence *** | | | BAC T10P11, complete | |
| | | SEQUENCING | | | sequence; Putative zinc- | |
| | | IN PROGRESS | | | finger protein; C2H2 Zn- | |
| | | *** from clone | | | finger signature from | |
| | | 140H19; HTGS | | | position 80 to 100 | |
| | | phase 1. | | | [CEICNKGFQRDQNLQ | |
| | | | | | LHRRGH] | |
| 237 | D49911 | Thermus | 0.044 | APP1_MOUSE | AMYLOID-LIKE | 8.90E−06 |
| | | thermophilus | | | PROTEIN 1 | |
| | | UvrA gene, | | | PRECURSOR | |
| | | complete cds. | | | (APLP)>PIR2:A46362 | |
| | | | | | amyloid precursor-like | |
| | | | | | protein- | |
| | | | | | mouse>GP:MUSAPLP_{—} | |
| | | | | | 1 Mouse amyloid | |
| | | | | | precursor-like protein | |
| | | | | | mRNA, complete cds | |
| 238 | D49911 | Thermus | 0.044 | MMCOL18A1 | Mus musculus alpha- | 1.60E−06 |
| | | thermophilus | | 1_2 | 1(XVIII) collagen | |
| | | UvrA gene, | | | (COL18A1) gene, exons | |
| | | complete cds. | | | 40- 43, complete cds | |
| 239 | X78119 | P. amygdalus, | 0.042 | CA44_HUMAN | COLLAGEN ALPHA | 2.00E−06 |
| | | Batsch (Texas) | | | 4(IV) CHAIN | |
| | | pru1 mRNA. | | | PRECURSOR>PIR1:CG | |
| | | | | | HU1B collagen alpha | |
| | | | | | 4(IV) chain precursor - | |
| | | | | | human>GP:HSCOL4A4_{—} | |
| | | | | | 1 H; sapiens mRNA for | |
| | | | | | collagen type IV alpha 4 | |
| | | | | | chain; Type IV collagen | |
| | | | | | alpha 4 chain | |
| 240 | U72877 | Rana catesbeiana | 0.041 | YRR6_MYCCA | HYPOTHETICAL 33.0 | 0.0008 |
| | | L-epinephrine | | | KD PROTEIN IN LICA | |
| | | transporter | | | 3′ REGION (ORF | |
| | | mRNA, complete | | | R6)>PIR2:S42125 | |
| | | cds. | | | hypothetical protein 3 - | |
| | | | | | Mycoplasma capricolum | |
| | | | | | (SGC3)>GP:MYCRPM | |
| | | | | | H_6 M; capricolum | |
| | | | | | rpmH, rnpA and licA | |
| | | | | | gene; Orf R6 | |
| 241 | L39891 | Homo sapiens | 0.04 | MUC2_HUM | MUCIN 2 | 5.90E−05 |
| | | polycystic kidney | | AN | (INTESTINAL MUCIN | |
| | | disease− | | | 2) (FRAGMENTS) | |
| | | associated protein | | | | |
| | | (PKD1) gene, | | | | |
| | | complete cds. | | | | |
| 242 | L40390 | Candida glabrata | 0.039 | G01763 | atrophin-1 - | 9.00E−07 |
| | | ERG3 gene, | | | human>GP:HSU23851_1 | |
| | | complete cds. | | | Human atrophin-1 | |
| | | | | | mRNA, complete cds | |
| 243 | B28113 | T2L16TRB | 0.038 | CELZK1248_{—} | Caenorhabditis elegans | 1.60E−18 |
| | | TAMU | | 14 | cosmid ZK1248 | |
| | | Arabidopsis | | | | |
| | | thaliana genomic | | | | |
| | | clone T2L16. | | | | |
| 244 | AC000030 | 00175, complete | 0.033 | ATFCA8_40 | Arabidopsis thaliana | 0.63 |
| | | sequence. | | | DNA chromosome 4, | |
| | | | | | ESSA I contig fragment | |
| | | | | | No; 8; Glycerol-3- | |
| | | | | | phosphate permease | |
| | | | | | homolog; Similarity to | |
| | | | | | glycerol-3-phosphate | |
| | | | | | permease - Haemophilus | |
| | | | | | influenzae | |
| 245 | B10738 | F13G15-Sp6 IGF | 0.032 | D87521_1 | Mus musculus DNA- | 0.21 |
| | | Arabidopsis | | | PKcs mRNA, complete | |
| | | thaliana genomic | | | cds | |
| | | clone F13G15. | | | | |
| 246 | AF024503 | Caenorhabditis | 0.03 | I38344 | titin - human | 1 |
| | | elegans cosmid | | | | |
| | | F31F4. | | | | |
| 247 | Z49888 | Caenorhabditis | 0.027 | KSU52064_1 | Kaposi's sarcoma- | 3.40E−10 |
| | | elegans cosmid | | | associated herpes-like | |
| | | F47A4, complete | | | virus ORF73 homolog | |
| | | sequence. | | | gene, complete cds; | |
| | | | | | Herpesvirus saimiri | |
| | | | | | ORF73 | |
| | | | | | homolog>GP:KSU75698_{—} | |
| | | | | | 78 Kaposi's sarcoma- | |
| | | | | | associated herpesvirus | |
| | | | | | long unique region, 80 | |
| | | | | | putative ORF's and | |
| | | | | | kaposin gene, complete | |
| | | | | | cds; OR | |
| 248 | Z83822 | Human DNA | 0.025 | GRSB_BACBR | GRAMICIDIN S | 1 |
| | | sequence from | | | SYNTHETASE II | |
| | | PAC 306D1 on | | | (GRAMICIDIN S | |
| | | chromosome X | | | BIOSYNTHESIS GRSB | |
| | | contains ESTs. | | | PROTEIN) (EC 6.-.-.-) | |
| 249 | Z94161 | Human DNA | 0.025 | S16323 | hypothetical protein - | 0.0079 |
| | | sequence *** | | | Arabidopsis | |
| | | SEQUENCING | | | thaliana>GP:ATHB1_1 | |
| | | IN PROGRESS | | | A; thaliana homeobox | |
| | | *** from clone | | | gene Athb-1 mRNA; | |
| | | N102C10; HTGS | | | Open reading frame | |
| | | phase 1. | | | | |
| 250 | AC002094 | Genomic | 0.021 | S57447 | HPBRII-7 protein - | 8.20E−08 |
| | | sequence from | | | human>GP:HSHPBRII4 | |
| | | Human 17, | | | _1 H; sapiens HPBRII-4 | |
| | | complete | | | mRNA>GP:HSHPBRII7 | |
| | | sequence. | | | _1 H; sapiens HPBRII-7 | |
| | | | | | gene | |
| 251 | D79994 | Human mRNA | 0.021 | CER10H10_1 | Caenorhabditis elegans | 7.00E−16 |
| | | for KIAA0172 | | | cosmid R10H10, | |
| | | gene, partial cds. | | | complete sequence; | |
| | | | | | R11A8; 7; Protein | |
| | | | | | predicted using | |
| | | | | | Genefinder; Similarity to | |
| | | | | | Mouse ankyrin (PIR Acc; | |
| | | | | | No; S37771); cDNA EST | |
| | | | | | CEESX25F comes from | |
| | | | | | this gene; | |
| 252 | Z97635 | Human DNA | 0.017 | CELW05H7_4 | Caenorhabditis elegans | 0.24 |
| | | sequence *** | | | cosmid W05H7 | |
| | | SEQUENCING | | | | |
| | | IN PROGRESS | | | | |
| | | *** from clone | | | | |
| | | 438L4; HTGS | | | | |
| | | phase 1. | | | | |
| 253 | X84996 | X. laevis mRNA | 0.017 | JN0786 | integrin beta-4 chain | 0.088 |
| | | for selenocysteine | | | precursor - mouse | |
| | | tRNA acting | | | | |
| | | factor (Staf). | | | | |
| 254 | AC002543 | Human BAC | 0.013 | MZLMTCYT | Mendozellus isis | 0.044 |
| | | clone RG300C03 | | BT_1 | mitochondrial NADH | |
| | | from 7q31.2, | | | dehydrogenase, and | |
| | | complete | | | cytochrome b genes, 3′ | |
| | | sequence. | | | end, and transfer RNA- | |
| | | | | | Ser gene; This codes for | |
| | | | | | the last 43 amino acids of | |
| | | | | | NADH dehydrogenase | |
| | | | | | subunit 1 followed | |
| 255 | U10401 | Caenorhabditis | 0.012 | MMMHC29N | Mus musculus major | 0.069 |
| | | elegans cosmid | | 7_2 | histocompatibility locus | |
| | | T20B12. | | | class III | |
| | | | | | region:butyrophilin-like | |
| | | | | | protein gene, partial cds; | |
| | | | | | Notch4, PBX2, RAGE, | |
| | | | | | lysophatidic acid acyl | |
| | | | | | transferase−alpha, | |
| | | | | | palmitoyl- | |
| 256 | L14593 | Saccharomyces | 0.011 | D86995_1 | Human (gene 1) DNA for | 2.20E−14 |
| | | cerevisiae protein | | | phosphatase 2C motif, | |
| | | phosphatase | | | partial cds | |
| | | (PTC1) gene, | | | | |
| | | complete cds. | | | | |
| 257 | U62317 | Chromosome | 0.0093 | P2Y8_XENLA | P2Y PURINOCEPTOR 8 | 0.89 |
| | | 22q13 BAC | | | (P2Y8)>GP:XLP2Y8_1 | |
| | | Clone | | | X; laevis mRNA for | |
| | | CIT987SK- | | | P2Y8 nucleotide receptor | |
| | | 384D8 complete | | | | |
| | | sequence. | | | | |
| 258 | D29655 | Pig mRNA for | 0.0075 | AF004858_1 | Mus musculus platelet | 1 |
| | | UMP-CMP | | | activating factor receptor | |
| | | kinase, complete | | | mRNA, partial cds; PAF- | |
| | | cds. | | | receptor | |
| 259 | AF002992 | Homo sapiens | 0.0054 | FBN1_BOVIN | FIBRILLIN 1 | 0.0004 |
| | | cosmid from | | | PRECURSOR>PIR2:A5 | |
| | | Xq28, complete | | | 5567 fibrillin I - | |
| | | sequence. | | | bovine>GP:BOVXAAA | |
| | | | | | A_1 Bos taurus mRNA, | |
| | | | | | complete cds; Putative | |
| 260 | B20752 | T19M2-T7 | 0.0043 | HSVT1IEP_1 | Feline herpesvirus type 1 | 3.90E−05 |
| | | TAMU | | | gene for immediate early | |
| | | Arabidopsis | | | protein, complete cds; | |
| | | thaliana genomic | | | Feline herpesvirus type 1 | |
| | | clone T19M2. | | | immediate early protein | |
| 261 | AB006699 | Arabidopsis | 0.0037 | YHV5_YEAST | HYPOTHETICAL 143.6 | 0.077 |
| | | thaliana genomic | | | KD PROTEIN IN | |
| | | DNA, | | | SPO16-REC104 | |
| | | chromosome 5, | | | INTERGENIC | |
| | | P1 clone: MDJ22. | | | REGION>PIR2:S46754 | |
| | | | | | hypothetical protein | |
| | | | | | YHR155w - yeast | |
| | | | | | (Saccharomyces | |
| | | | | | cerevisiae)>GPN:YSCH9 | |
| | | | | | 666_15 Saccharomyces | |
| | | | | | cerevisiae chromosome | |
| | | | | | VIII cosmid 9666; | |
| | | | | | Yhr155wp; Similar to | |
| | | | | | Sip3p (Snf | |
| 262 | Z99128 | Human DNA | 0.0032 | ALU1_HUM | !!!! ALU SUBFAMILY J | 0.0087 |
| | | sequence *** | | AN | WARNING ENTRY !!!! | |
| | | SEQUENCING | | | | |
| | | IN PROGRESS | | | | |
| | | *** from clone | | | | |
| | | 422H11; HTGS | | | | |
| | | phase 1. | | | | |
| 263 | B21848 | T2D2-Sp6 | 0.0031 | B31794 | mdm-1 protein (clone | 1.00E−05 |
| | | TAMU | | | c103) - mouse | |
| | | Arabidopsis | | | | |
| | | thaliana genomic | | | | |
| | | clone T2D2. | | | | |
| 264 | L33853 | Human germline | 0.0027 | B45550 | cytochrome b homolog - | 0.99 |
| | | immunoglobulin | | | Plasmodium yoelii | |
| | | kappa chain | | | | |
| | | variable region | | | | |
| | | (Vk-IV subgroup) | | | | |
| | | for anti-B- | | | | |
| | | amyloid | | | | |
| | | autoantibodies in | | | | |
| | | Alzheimer's | | | | |
| | | disease. | | | | |
| 265 | B36863 | HS-1042-A1- | 0.0027 | YQK4_CAEEL | HYPOTHETICAL 64.3 | 0.81 |
| | | F01-MR.abi CIT | | | KD PROTEIN C56G2.4 | |
| | | Human Genomic | | | IN CHROMOSOME | |
| | | Sperm Library C | | | III>GP:CELC56G2_2 | |
| | | Homo sapiens | | | Caenorhabditis elegans | |
| | | genomic clone | | | cosmid C56G2 | |
| | | Plate = CT 824 | | | | |
| | | Col = 1 Row = K. | | | | |
| 266 | AC003041 | *** | 0.0024 | GLB4_LAMSP | GIANT HEMOGLOBIN | 0.94 |
| | | SEQUENCING | | | AIV CHAIN | |
| | | IN PROGRESS | | | (FRAGMENT)>PIR2:S0 | |
| | | *** Homo | | | 1810 hemoglobin AIV - | |
| | | sapiens | | | tube worm | |
| | | chromosome 17, | | | (Lamellibrachia sp.) | |
| | | clone | | | (fragment) | |
| | | HCIT307A16; | | | | |
| | | HTGS phase 1, | | | | |
| | | 10 unordered | | | | |
| | | pieces. | | | | |
| 267 | AC002315 | Mouse BAC- | 0.0022 | MG42_TARMA | SRY-RELATED | 0.99 |
| | | 146N21 | | | PROTEIN MG42 | |
| | | Chromosome X | | | (FRAGMENT)>PIR3:I5 | |
| | | contains | | | 1369 Sry-related | |
| | | iduronate−2- | | | sequence - Tarentola | |
| | | sulfatase gene; | | | mauritanica | |
| | | complete | | | (fragment)>GP:TELMG4 | |
| | | sequence. | | | 2DNA_1 Gecko MG42 | |
| | | | | | gene, partial cds; Sry- | |
| | | | | | related sequence | |
| 268 | AF016674 | Caenorhabditis | 0.0015 | SCYJL204C_1 | S; cerevisiae chromosome | 1 |
| | | elegans cosmid | | | X reading frame ORF | |
| | | C03H5. | | | YJL204c | |
| 269 | AF016674 | Caenorhabditis | 0.0015 | CEM199_3 | Caenorhabditis elegans | 0.97 |
| | | elegans cosmid | | | cosmid M199, complete | |
| | | C03H5. | | | sequence; M199; e; | |
| | | | | | Protein predicted using | |
| | | | | | Genefinder; preliminary | |
| | | | | | prediction | |
| 270 | AF016674 | Caenorhabditis | 0.0015 | CEM199_3 | Caenorhabditis elegans | 0.97 |
| | | elegans cosmid | | | cosmid M199, complete | |
| | | C03H5. | | | sequence; M199; e; | |
| | | | | | Protein predicted using | |
| | | | | | Genefinder; preliminary | |
| | | | | | prediction | |
| 271 | Z54199 | L. esculentum | 0.0015 | CELF20A1_5 | Caenorhabditis elegans | 0.11 |
| | | DNA Ailsa craig | | | cosmid F20A1; Coded | |
| | | encoding 1- | | | for by C; elegans cDNA | |
| | | aminocyclopropa | | | yk9g1; 3; coded for by C; | |
| | | ne−1-carboxylic | | | elegans cDNA yk9g1; 5; | |
| | | acid oxidase. | | | coded for by C; elegans | |
| | | | | | cDNA CEESU55F; weak | |
| | | | | | similarity to putative | |
| 272 | Z99943 | Human DNA | 0.0014 | CEK08F8_5 | Caenorhabditis elegans | 0.93 |
| | | sequence *** | | | cosmid K08F8, complete | |
| | | SEQUENCING | | | sequence; K08F8; 5b | |
| | | IN PROGRESS | | | | |
| | | *** from clone | | | | |
| | | 313L4; HTGS | | | | |
| | | phase 1. | | | | |
| 273 | S81083 | beta- | 0.0013 | MTCY277_7 | Mycobacterium | 0.0001 |
| | | ADD = adducin | | | tuberculosis cosmid | |
| | | beta subunit 63 | | | Y277; Unknown; | |
| | | kda | | | MTCY277; 07c, | |
| | | isoform/membran | | | unknown, len: 302 | |
| | | e skeleton | | | | |
| | | protein, beta - | | | | |
| | | ADD'2 adducin | | | | |
| | | beta subunit 63 | | | | |
| | | kda | | | | |
| | | isoform/membran | | | | |
| | | e skeleton protein | | | | |
| | | {alternatively | | | | |
| | | spliced, exon 10 | | | | |
| | | to 13 region} | | | | |
| | | [human, | | | | |
| | | Genomic, 1851 | | | | |
| | | nt, segment 3 of | | | | |
| | | 3]. | | | | |
| 274 | Z82174 | Human DNA | 0.001 | FBLA_HUM | FIBULIN-1, ISOFORM | 0.00063 |
| | | sequence from | | AN | A | |
| | | cosmid B20F6 on | | | PRECURSOR>GP:HSFI | |
| | | chromosome | | | BUA_1 H; sapiens | |
| | | 22q11.2-qter. | | | mRNA for fibulin-1 A | |
| 275 | Z82215 | Human DNA | 0.00079 | BFR1_SCHPO | BREFELDIN A | 0.15 |
| | | sequence *** | | | RESISTANCE | |
| | | SEQUENCING | | | PROTEIN>PIR2:S52239 | |
| | | IN PROGRESS | | | hba2 protein - fission | |
| | | *** from clone | | | yeast | |
| | | 68O2; HTGS | | | (Schizosaccharomyces | |
| | | phase 1. | | | pombe)>GP:SPHBA2GE | |
| | | | | | N_1 S; pombe hba2 gene | |
| 276 | U28153 | Caenorhabditis | 0.00071 | CX2_HEMHA | CYTOTOXIN 2 (TOXIN | 0.32 |
| | | elegans UNC-76 | | | 12A) | |
| | | (unc-76) gene, | | | | |
| | | complete cds. | | | | |
| 277 | Z82204 | Human DNA | 0.00054 | DMU34925_2 | Drosophila melanogaster | 0.045 |
| | | sequence from | | | DNA repair protein (mei- | |
| | | clone J362G171. | | | 41) gene, complete cds, | |
| | | | | | and TH1 gene, partial cds | |
| 278 | AC002530 | Human BAC | 0.00053 | CELT28F2_2 | Caenorhabditis elegans | 0.037 |
| | | clone RG341D10 | | | cosmid T28F2; Weak | |
| | | from 7p15-p21, | | | similarity to HSP90 | |
| | | complete | | | | |
| | | sequence. | | | | |
| 279 | U91322 | Human | 0.00051 | CEW08D2_2 | Caenorhabditis elegans | 0.26 |
| | | chromosome | | | cosmid W08D2, | |
| | | 16p13 BAC clone | | | complete sequence; | |
| | | CIT987SK-276F8 | | | W08D2; 3; Protein | |
| | | complete | | | predicted using | |
| | | sequence. | | | Genefinder>GP:CEW08 | |
| | | | | | D2_2 Caenorhabditis | |
| | | | | | elegans cosmid W08D2; | |
| | | | | | W08D2; 3; Protein | |
| | | | | | predicted using | |
| | | | | | Genefinder | |
| 280 | D16986 | Human HepG2 | 0.00037 | POLG_PPVNA | GENOME | 0.48 |
| | | partial cDNA, | | | POLYPROTEIN | |
| | | clone | | | (CONTAINS: N- | |
| | | hmd2b09m5. | | | TERMINAL PROTEIN; | |
| | | | | | HELPER COMPONENT | |
| | | | | | PROTEINASE (EC | |
| | | | | | 3.4.22.-) (HC-PRO); 42- | |
| | | | | | 50 KD PROTEIN; | |
| | | | | | CYTOPLASMIC | |
| | | | | | INCLUSION PROTEIN | |
| | | | | | (CI); 6 KD PROTEIN; | |
| | | | | | NUCLEAR | |
| | | | | | INCLUSION PROTEIN | |
| | | | | | A (NI-A) (EC 3.4.22.-) | |
| | | | | | (49K PROTEINASE) (49 | |
| 281 | U91318 | Human | 0.00031 | <NONE> | <NONE> | <NONE> |
| | | chromosome | | | | |
| | | 16p13 BAC clone | | | | |
| | | CIT987SK- | | | | |
| | | 962B4 complete | | | | |
| | | sequence. | | | | |
| 282 | M93406 | Human dispersed | 0.0003 | VG8_SPV4 | GENE 8 | 0.23 |
| | | Alu repeats and | | | PROTEIN>PIR1:G8BPS | |
| | | dispersed L1 | | | V gene 8 protein - | |
| | | repeat. | | | spiroplasma virus 4 | |
| | | | | | (SGC3) | |
| 283 | AC002398 | Human DNA | 0.00021 | HMCA_DRO | HOMEOTIC CAUDAL | 0.021 |
| | | from | | ME | PROTEIN>PIR2:A26357 | |
| | | chromosome 19- | | | homeotic protein Cad - | |
| | | specific cosmid | | | fruit fly (Drosophila | |
| | | F25965, genomic | | | melanogaster)>GP:DRO | |
| | | sequence, | | | CADA2_1 | |
| | | complete | | | D; melanogaster caudal | |
| | | sequence. | | | gene (cad) encoding a | |
| | | | | | maternal and zygotic | |
| | | | | | transcript, exon 2; Caudal | |
| | | | | | protein>TFD:TFDP0015 | |
| | | | | | 9 - Polypeptides en | |
| 284 | AC002530 | Human BAC | 0.0002 | PL0009 | complement | 0.7 |
| | | clone RG341D10 | | | C3d/Epstein-Barr virus | |
| | | from 7p15-p21, | | | receptor precursor - | |
| | | complete | | | human | |
| | | sequence. | | | | |
| 285 | X01871 | Yeast | 0.00015 | RVZMTCYT | Reventazonia sp; | 0.73 |
| | | mitochondrial | | BT_1 | mitochondrial NADH | |
| | | ori(o) repeat unit | | | dehydrogenase, and | |
| | | of petite mutant 5 | | | cytochrome b genes, 3′ | |
| | | (petite strain s- | | | end, and transfer RNA- | |
| | | 10/7/2). | | | Ser gene; This codes for | |
| | | | | | the last 43 amino acids of | |
| | | | | | NADH dehydrogenase | |
| | | | | | subunit 1 followed | |
| 286 | U89984 | Acanthamoeba | 0.00015 | ACU89984_1 | Acanthamoeba castellanii | 4.20E−13 |
| | | castellanii | | | transformation-sensitive | |
| | | transformation- | | | protein homolog mRNA, | |
| | | sensitive protein | | | complete cds; Similar to | |
| | | homolog mRNA, | | | human transformation- | |
| | | complete cds. | | | sensitive protein: | |
| | | | | | SwissProt Accession | |
| | | | | | Number P31948 | |
| 287 | AC002365 | Homo sapiens | 0.00011 | S10340 | DNA-directed RNA | 0.00062 |
| | | chromosome X | | | polymerase (EC 2.7.7.6) | |
| | | clone U177G4, | | | - yeast (Kluyveromyces | |
| | | U152H5, | | | marxianus var. lactis) | |
| | | U168D5, 174A6, | | | | |
| | | U172D6, and | | | | |
| | | U186B3 from | | | | |
| | | Xp22, complete | | | | |
| | | sequence. | | | | |
| 288 | AC002390 | Human DNA | 9.90E−05 | D86603_1 | Mouse mRNA for Bach | 1 |
| | | from overlapping | | | protein 1, complete cds; | |
| | | chromosome 19- | | | Bach 1 | |
| | | specific cosmids | | | | |
| | | R30072 and | | | | |
| | | R28588, genomic | | | | |
| | | sequence, | | | | |
| | | complete | | | | |
| | | sequence. | | | | |
| 289 | AC002980 | Homo sapiens ; | 9.20E−05 | TRBKPCYB_1 | Trypanosoma brucei | 0.52 |
| | | HTGS phase 1, | | | kinetoplast | |
| | | 34 unordered | | | apocytochrome b gene, | |
| | | pieces. | | | complete cds | |
| 290 | M99412 | Human | 4.50E−05 | S28832 | microtubule−associated | 0.88 |
| | | interleukin-8 | | | protein H1 (clone KS3.1) | |
| | | receptor (IL8RB) | | | - longfin squid | |
| | | gene, complete | | | (fragment) | |
| | | cds. | | | | |
| 291 | AC000120 | Human BAC | 4.00E−05 | SXSCRBA_1 | S; xylosus scrB and scrR | 0.99 |
| | | clone RG161K23 | | | genes; Sucrose repressor | |
| | | from 7q21, | | | | |
| | | complete | | | | |
| | | sequence. | | | | |
| 292 | AC003037 | Homo sapiens; | 3.40E−05 | S13569 | hypothetical protein 5 - | 0.018 |
| | | HTGS phase 1, | | | Lactococcus lactis subsp, | |
| | | 66 unordered | | | lactis insertion sequence | |
| | | pieces. | | | 1076>GP:LLTLE_1 | |
| | | | | | Lactococcus lactis DNA | |
| | | | | | for the transposon-like | |
| | | | | | element on the lactose | |
| | | | | | plasmid; ORF5 (AA 1 - | |
| | | | | | 43) | |
| 293 | Z81512 | Caenorhabditis | 2.40E−05 | MUSDBPRC_1 | Mus musculus DNA- | 1 |
| | | elegans cosmid | | | binding protein Rc | |
| | | F25C8, complete | | | mRNA, complete cds; | |
| | | sequence. | | | DNA binding protein Rc | |
| 294 | B16681 | 343C3.TVB | 1.10E−05 | COPP_YEAST | COATOMER BETA′ | 0.081 |
| | | CIT978SKA1 | | | SUBUNIT (BETA′ - | |
| | | Homo sapiens | | | COAT PROTEIN) | |
| | | genomic clone A- | | | BETA′ - | |
| | | 343C03. | | | COP)>PIR2:B55123 | |
| | | | | | coatomer complex beta′ | |
| | | | | | chain - yeast | |
| | | | | | (Saccharomyces | |
| | | | | | cerevisiae)>GPN:SCYG | |
| | | | | | L137W_1 S; cerevisiae | |
| | | | | | chromosome VII reading | |
| | | | | | frame ORF | |
| | | | | | YGL137w>GP:SCU1123 | |
| | | | | | 7_1 Saccharomyces | |
| | | | | | cerevisiae | |
| 295 | Z16523 | H. sapiens | 1.00E−05 | MMSEMF_1 | M; musculus mRNA for | 0.78 |
| | | (D9S158) DNA | | | semaphorin F; | |
| | | segment | | | Smaphorin F | |
| | | containing (CA) | | | | |
| | | repeat; clone | | | | |
| | | AFM073yb11; | | | | |
| | | single read. | | | | |
| 296 | Z49704 | S. cerevisiae | 5.60E−06 | <NONE> | <NONE> | <NONE> |
| | | chromosome XIII | | | | |
| | | cosmid 8021. | | | | |
| 297 | AC003071 | Human BAC | 3.00E−06 | HSRCAER_1 | H; sapiens mRNA for red | 0.21 |
| | | clone BK085E05 | | | cell anion exchanger | |
| | | from 22q12.1- | | | (EPB3, AE1, Band 3) 3′ | |
| | | qter, complete | | | non-coding region | |
| | | sequence. | | | | |
| 298 | U20428 | Human SNC19 | 1.40E−06 | HUMMUC2A | Human mucin-2 gene, | 4.40E−06 |
| | | mRNA sequence. | | _1 | partial cds | |
| 299 | U51903 | Human RasGAP- | 6.60E−07 | IQGA_HUMAN | RAS GTPASE− | 1.60E−14 |
| | | related protein | | | ACTIVATING-LIKE | |
| | | (IQGAP2) | | | PROTEIN IQGAP1 | |
| | | mRNA, complete | | | (P195)>PIR2:A54854 | |
| | | cds. | | | Ras GTPase activating- | |
| | | | | | related protein - | |
| | | | | | human>GP:HUMIQGA_{—} | |
| | | | | | 1 Homo sapiens ras | |
| | | | | | GTPase−activating-like | |
| | | | | | protein (IQGAP1) | |
| | | | | | mRNA, complete cds; | |
| | | | | | Amino acid feature: IQ | |
| | | | | | calmodulin-binding do | |
| 300 | AL000805 | F. rubripes GSS | 4.70E−07 | MT13_MYTED | METALLOTHIONEIN | 2.20E−10 |
| | | sequence, clone | | | 10-III (MT-10- | |
| | | 021G08aA1. | | | III)>PIR2:S39418 | |
| | | | | | metallothionein 10-III - | |
| | | | | | blue mussel | |
| 301 | AC003016 | Human BAC | 4.30E−07 | SPC57A10_5 | S; pombe chromosome I | 0.00041 |
| | | clone RG134C19 | | | cosmid c57A10; | |
| | | from 8q21, | | | Unknown; | |
| | | complete | | | SPAC57A10; 05; c | |
| | | sequence. | | | unknown, len:606aa, | |
| | | | | | similar to A; nidulans | |
| | | | | | Q00659, sulfur | |
| | | | | | metabolite repression | |
| | | | | | control, (678aa), fasta | |
| | | | | | scores, opt:1355, | |
| 302 | AC003089 | Human BAC | 3.80E−07 | HPBPRECK_1 | Hepatitis B virus type 11 | 0.41 |
| | | clone | | | precore protein (pre−C | |
| | | RG180F08A, | | | region, C) gene, 5′ end | |
| | | complete | | | | |
| | | sequence. | | | | |
| 303 | AC002074 | Human BAC | 2.40E−07 | A47021_1 | Sequence 23 from Patent | 0.0016 |
| | | clone GS056H18 | | | WO9527787; Unnamed | |
| | | from 7q31-q32, | | | protein product; Author- | |
| | | complete | | | given protein sequence is | |
| | | sequence. | | | in conflict with the | |
| | | | | | conceptual | |
| | | | | | translation>GP:A51260_{—} | |
| | | | | | 1 Sequence 23 from | |
| | | | | | Patent WO9614416; | |
| | | | | | Unnamed protein | |
| | | | | | product; Author-given | |
| | | | | | protein sequence is i | |
| 304 | U04980 | Rattus norvegicus | 2.20E−07 | HUMFSHD_1 | Human | 3.30E−08 |
| | | fetal troponin T 3 | | | facioscapulohumeral | |
| | | (fetal TnT3) | | | muscular dystrophy | |
| | | mRNA, partial | | | (FSHD) gene region, | |
| | | cds. | | | D4Z4 tandem repeat unit; | |
| | | | | | ORF | |
| 305 | U68704 | Human | 2.00E−07 | HHV6AGNM | Human herpesvirus-6 | 2.70E−05 |
| | | chromosome | | _96 | (HHV-6) U1102, variant | |
| | | 21q22.3 P1-clone | | | A, complete virion | |
| | | 3804 subclone 4- | | | genome; U88; Cys | |
| | | 52. | | | repeats; this loci is open | |
| | | | | | in all six reading frames, | |
| | | | | | part of IE−A | |
| 306 | U51583 | Rattus norvegicus | 8.70E−08 | AF005370_67 | Alcelaphine herpesvirus | 6.10E−07 |
| | | zinc finger | | | 1 L-DNA, complete | |
| | | homeodomain | | | sequence; Putative | |
| | | enhancer-binding | | | immediate early protein; | |
| | | protein-1 (Zfhep- | | | ORF73; similar to H; | |
| | | 1) mRNA, partial | | | saimiri and KSHV | |
| | | cds. | | | ORF73 | |
| 307 | M80206 | Mus domesticus | 8.10E−08 | I53960 | PRR2 alpha - human | 1.70E−28 |
| | | poliovirus | | | | |
| | | receptor homolog | | | | |
| | | (MPH) mRNA, | | | | |
| | | complete cds. | | | | |
| 308 | M60854 | Human ribosomal | 5.70E−08 | OLVPOL_1 | Caprine arthritis | 0.27 |
| | | protein S16 | | | encephalitis virus (isolate | |
| | | mRNA, complete | | | OVLV-N1) pol protein | |
| | | cds. | | | gene, 3′ end of cds; Nt | |
| | | | | | 2497-2695 from CAEV | |
| | | | | | Co | |
| 309 | U82828 | Homo sapiens | 1.50E−08 | C40201 | artifact-warning | 0.00044 |
| | | ataxia | | | sequence (translated | |
| | | telangiectasia | | | ALU class C) - human | |
| | | (ATM) gene, | | | | |
| | | complete cds. | | | | |
| 310 | Z83836 | Human DNA | 1.40E−08 | HSU64473_1 | Human rheumatoid | 0.34 |
| | | sequence from | | | arthritis synovium | |
| | | PAC 111J24 on | | | immunoglobulin heavy | |
| | | chromosome | | | chain variable region | |
| | | 22q12-qter | | | mRNA, partial | |
| | | contains ESTs. | | | cds>GP:HSU64498_1 | |
| | | | | | Human rheumatoid | |
| | | | | | arthritis synovium | |
| | | | | | immunoglobulin heavy | |
| | | | | | chain variable region | |
| | | | | | mRNA, partial cds | |
| 311 | Z50029 | Caenorhabditis | 1.40E−08 | MMU88984_1 | Mus musculus NIK | 1.70E−50 |
| | | elegans cosmid | | | mRNA, complete cds | |
| | | ZC504, complete | | | | |
| | | sequence. | | | | |
| 312 | AC002351 | Homo sapiens; | 1.20E−08 | D41132 | collagen-related protein 4 | 0.02 |
| | | HTGS phase 1, | | | - Hydra magnipapillata | |
| | | 17 unordered | | | (fragment)>PIR2:S21932 | |
| | | pieces. | | | mini-collagen - Hydra | |
| | | | | | sp.>GP:HSNCOL4_1 | |
| | | | | | Hydra N-COL 4 mRNA | |
| | | | | | for mini-collagen; No | |
| | | | | | start codon | |
| 313 | B65763 | CIT-HSP- | 3.60E−09 | S18106 | type II site−specific | 0.045 |
| | | 2023A12.TR | | | deoxyribonuclease (EC | |
| | | CIT-HSP Homo | | | 3.1.21.4) AbrI - | |
| | | sapiens genomic | | | Azospirillum brasilense | |
| | | clone 2023A 12. | | | | |
| 314 | Z93021 | Human DNA | 2.00E−09 | AB001684_134 | Chlorella vulgaris C-27 | 0.6 |
| | | sequence *** | | | chloroplast DNA, | |
| | | SEQUENCING | | | complete sequence; RNA | |
| | | IN PROGRESS | | | polymerase gamma | |
| | | *** from clone | | | subunit | |
| | | 516C23; HTGS | | | | |
| | | phase 1. | | | | |
| 315 | D88035 | Rat mRNA for | 1.50E−09 | D88035_1 | Rat mRNA for | 1.00E−33 |
| | | glycoprotein | | | glycoprotein specific | |
| | | specific UDP- | | | UDP- | |
| | | glucuronyltransfe | | | glucuronyltransferase, | |
| | | rase, complete | | | complete cds | |
| | | cds. | | | | |
| 316 | U85193 | Human nuclear | 1.30E−10 | VGF1_IBVB | F1 | 1 |
| | | factor I-B2 | | | PROTEIN>PIR1:VF1HB | |
| | | (NF1B2) mRNA, | | | 1 F1 protein - avian | |
| | | complete cds. | | | infectious bronchitis | |
| | | | | | virus (strain | |
| | | | | | Beaudette)>GP:IBACGB | |
| | | | | | _1 Avian infectious | |
| | | | | | bronchitis virus pol | |
| | | | | | protein, spike protein, | |
| | | | | | small virion-associated | |
| | | | | | protein, membrane | |
| | | | | | protein, and nucleocapsid | |
| | | | | | protein gen | |
| 317 | B04719 | cSRL-42G12-u | 7.90E−11 | JC5238 | galactosylceramide−like | 0.31 |
| | | cSRL flow sorted | | | protein, GCP - human | |
| | | Chromosome 11 | | | | |
| | | specific cosmid | | | | |
| | | Homo sapiens | | | | |
| | | genomic clone | | | | |
| | | cSRL-42G12. | | | | |
| 318 | M73506 | Mouse Top-10c (t | 2.80E−11 | A39487 | T-complex protein 10a | 4.10E−16 |
| | | allele) gene. | | | (allele 129) - mouse | |
| 319 | U71148 | Human Xq28 | 1.20E−11 | A56547 | sex-peptide precursor - | 0.4 |
| | | cosmids U225B5 | | | Drosophila suzukii | |
| | | and U236A12, | | | | |
| | | complete | | | | |
| | | sequence. | | | | |
| 320 | Z95116 | Human DNA | 9.90E−13 | ALU2_HUM | !!!! ALU SUBFAMILY | 0.0017 |
| | | sequence *** | | AN | SB WARNING ENTRY | |
| | | SEQUENCING | | | !!!! | |
| | | IN PROGRESS | | | | |
| | | *** from clone | | | | |
| | | 57G9; HTGS | | | | |
| | | phase 1. | | | | |
| 321 | M64795 | Rat MHC class I | 1.70E−14 | STC_DROME | SHUTTLE CRAFT | 1.40E−13 |
| | | antigen gene | | | PROTEIN>GP:DMU093 | |
| | | (RT1-u | | | 06_1 Drosophila | |
| | | haplotype), | | | melanogaster shuttle craft | |
| | | complete cds. | | | protein (stc) mRNA, | |
| | | | | | complete cds; C-terminal | |
| | | | | | 222 amino acids encode a | |
| | | | | | novel single−stranded | |
| | | | | | DNA binding domain | |
| 322 | Y09036 | H. sapiens | 4.20E−15 | AF010403_1 | Homo sapiens ALR | 1 |
| | | NTRK1 gene, | | | mRNA, complete cds; | |
| | | exon 17. | | | Alternatively spliced; | |
| | | | | | similarity to ALL-1 and | |
| | | | | | Drosophila trithorax | |
| 323 | U12523 | Rattus norvegicus | 2.90E−15 | SPBC30D10_4 | S; pombe chromosome II | 2.40E−09 |
| | | ultraviolet B | | | cosmid c30D10; | |
| | | radiation- | | | Hypothetical protein; | |
| | | activated UV98 | | | SPBC30D10; 04, | |
| | | mRNA, partial | | | unknown, len:148aa | |
| | | sequence. | | | | |
| 324 | Z98755 | Human DNA | 2.20E−15 | RPON_HAL | DNA-DIRECTED RNA | 0.019 |
| | | sequence *** | | MA | POLYMERASE | |
| | | SEQUENCING | | | SUBUNIT N (EC | |
| | | IN PROGRESS | | | 2.7.7.6)>PIR2:D41715 | |
| | | *** from clone | | | DNA-directed RNA | |
| | | 76C18; HTGS | | | polymerase II chain | |
| | | phase 1. | | | RPB10 homolog - | |
| | | | | | Haloarcula | |
| | | | | | marismortui>GP:HALH | |
| | | | | | MAENOA_4 | |
| | | | | | H; marismortui tRNA- | |
| | | | | | Leu, HL29, HmaL 13, | |
| | | | | | HmaS9, OrfMMV, | |
| | | | | | OrfMNA, 2- | |
| | | | | | phosphoglycerate dehydr | |
| 325 | M86917 | Human oxysterol- | 1.60E−15 | CEF14H8_2 | Caenorhabditis elegans | 2.10E−18 |
| | | binding protein | | | cosmid F14H8, complete | |
| | | (OSBP) mRNA, | | | sequence; F14H8; 1; | |
| | | complete cds. | | | Similarity to Human | |
| | | | | | oxysterol-binding protein | |
| | | | | | (SW:OXYB_HUMAN) | |
| 326 | AC001231 | Genomic | 1.30E−15 | AC002397_3 | Mouse BAC284H12 | 0.0016 |
| | | sequence from | | | Chromosome 6, complete | |
| | | Human 17, | | | sequence; DRPLA | |
| | | complete | | | | |
| | | sequence. | | | | |
| 327 | AL008626 | Human DNA | 5.30E−16 | TAU48227_1 | Triticum aestivum | 5.90E−05 |
| | | sequence *** | | | soluble starch synthase | |
| | | SEQUENCING | | | mRNA, partial cds | |
| | | IN PROGRESS | | | | |
| | | *** from clone | | | | |
| | | 1114G22; HTGS | | | | |
| | | phase 1. | | | | |
| 328 | L04483 | Human ribosomal | 7.60E−17 | RS21_HUMAN | 40S RIBOSOMAL | 1.40E−09 |
| | | protein S21 | | | PROTEIN | |
| | | (RPS21) mRNA, | | | S21>PIR2:S34108 | |
| | | complete cds. | | | ribosomal protein S21 - | |
| | | | | | human>GP:SSZ84015_1 | |
| | | | | | S; scrofa mRNA; | |
| | | | | | expressed sequence tag | |
| | | | | | (3′; clone c11g10); 40S | |
| | | | | | ribosomal protein S21; | |
| | | | | | Similar to human 40S | |
| | | | | | ribosomal protein | |
| | | | | | S21>GP:HUMRPS21X_{—} | |
| | | | | | 1 Human ribosomal | |
| 329 | AB001899 | Homo sapiens | 6.70E−17 | LRP1_HUMAN | LOW-DENSITY | 1 |
| | | PACE4 gene, | | | LIPOPROTEIN | |
| | | exon 2. | | | RECEPTOR-RELATED | |
| | | | | | PROTEIN 1 | |
| | | | | | PRECURSOR (LRP) | |
| | | | | | (ALPHA-2- | |
| | | | | | MACROGLOBULIN | |
| | | | | | RECEPTOR) (A2MR) | |
| | | | | | (APOLIPOPROTEIN E | |
| | | | | | RECEPTOR) | |
| | | | | | (APOER)>PIR2:S02392 | |
| | | | | | LDL receptor-related | |
| | | | | | protein precursor - | |
| | | | | | human>GP:HSLDLRRL | |
| | | | | | _1 Human mRNA for | |
| | | | | | LDL-recept | |
| 330 | Z98755 | Human DNA | 4.40E−17 | U97553_59 | Murine herpesvirus 68 | 0.06 |
| | | sequence *** | | | strain WUMS, complete | |
| | | SEQUENCING | | | genome; Ribonucleotide | |
| | | IN PROGRESS | | | reductase large | |
| | | *** from clone | | | | |
| | | 76C18; HTGS | | | | |
| | | phase 1. | | | | |
| 331 | AF017187 | Homo sapiens | 3.90E−18 | D84255_1 | Ovophis okinavensis | 0.007 |
| | | LTR HERV-K | | | mitochondrial DNA for | |
| | | repetitive element | | | NADH dehydrogenase | |
| | | fragment | | | subunit 1, partial cds, Ile− | |
| | | ltr_19_9a | | | tRNA, Pro-tRNA, Phe− | |
| | | sequence. | | | tRNA, Gln-tRNA, Met- | |
| | | | | | tRNA and control region | |
| | | | | | (D-loop region); This cds | |
| 332 | B36252 | HS-1038-A2- | 3.10E−18 | PGBM_MOU | BASEMENT | 0.00015 |
| | | G01-MR.abi CIT | | SE | MEMBRANE− | |
| | | Human Genomic | | | SPECIFIC HEPARAN | |
| | | Sperm Library C | | | SULFATE | |
| | | Homo sapiens | | | PROTEOGLYCAN | |
| | | genomic clone | | | CORE PROTEIN | |
| | | Plate = CT 820 | | | PRECURSOR (HSPG) | |
| | | Col = 2 Row = M. | | | (PERLECAN) | |
| | | | | | (PLC)>PIR2:S18252 | |
| | | | | | heparan sulfate | |
| | | | | | proteoglycan - | |
| | | | | | mouse>GP:MUSPERPA | |
| | | | | | _1 Mouse perlecan | |
| | | | | | mRNA, complete cds | |
| 333 | D78255 | Mouse mRNA for | 2.70E−18 | MUSPAP1_1 | Mouse mRNA for PAP- | 3.50E−18 |
| | | PAP-1, complete | | | 1, complete cds | |
| | | cds. | | | | |
| 334 | AC003046 | Human Xp22 | 1.40E−18 | CEC34F6_1 | Caenorhabditis elegans | 0.0015 |
| | | PACs RPC11- | | | cosmid C34F6; C34F6; 1; | |
| | | 263P4 and | | | CDNA EST yk46b12; 5 | |
| | | RPC11-164K3 | | | comes from this gene; | |
| | | complete | | | cDNA EST yk44c4; 5 | |
| | | sequence. | | | comes from this gene; | |
| | | | | | cDNA EST yk46b12; 3 | |
| | | | | | comes from this gene | |
| 335 | AC003002 | Human DNA | 1.40E−18 | MUSZFP0_1 | Mouse mRNA for zinc | 1.30E−19 |
| | | from overlapping | | | finger protein, partial | |
| | | chromosome 19- | | | sequence | |
| | | specific cosmids | | | | |
| | | R29515 and | | | | |
| | | R28253, genomic | | | | |
| | | sequence, | | | | |
| | | complete | | | | |
| | | sequence. | | | | |
| 336 | Y15054 | Rattus norvegicus | 3.40E−19 | HS4U2IR2_1 | Epstein-Barr virus | 2.00E−06 |
| | | mRNA for 70 | | | (AG876 isolate) U2-IR2 | |
| | | kDa tumor | | | domain encoding nuclear | |
| | | specific antigen, | | | protein EBNA2, | |
| | | partial. | | | complete cds; Nuclear | |
| | | | | | antigen 2 | |
| 337 | Z97876 | Human DNA | 1.30E−19 | AF003535_1 | Homo sapiens L1 | 7.00E−05 |
| | | sequence *** | | | element ORF2-like | |
| | | SEQUENCING | | | protein gene, partial cds | |
| | | IN PROGRESS | | | | |
| | | *** from clone | | | | |
| | | 295C6; HTGS | | | | |
| | | phase 1. | | | | |
| 338 | M97159 | Mouse (clone | 1.10E−19 | A26882 | pIL2 hypothetical protein | 0.2 |
| | | pIL2) B1 | | | - rat | |
| | | dispersed repeat | | | (fragment)>GP:RATTD | |
| | | unit. | | | R_1 Rat growth and | |
| | | | | | transformation-dependent | |
| | | | | | mRNA, 3′ end; Growth | |
| | | | | | and transformation | |
| | | | | | dependent protein | |
| 339 | U30817 | Bos taurus very- | 4.70E−20 | ACDV_RAT | ACYL-COA | 8.10E−25 |
| | | long-chain acyl- | | | DEHYDROGENASE, | |
| | | CoA | | | VERY-LONG-CHAIN | |
| | | dehydrogenase | | | SPECIFIC | |
| | | mRNA, nuclear | | | PRECURSOR (EC | |
| | | gene encoding | | | 1.3.99.-) | |
| | | mitochondrial | | | (VLCAD)>PIR2:A54872 | |
| | | protein, complete | | | acyl-CoA dehydrogenase | |
| | | cds. | | | (EC 1.3.99.-) very-long- | |
| | | | | | chain-specific precursor - | |
| | | | | | rat>GP:RATVLCAD_1 | |
| | | | | | Rat mRNA for very- | |
| | | | | | long-chain Acyl-CoA | |
| | | | | | dehydrogenase, compl | |
| 340 | Y11535 | H. sapiens mRNA | 2.80E−20 | ALU1_HUM | !!!! ALU SUBFAMILY J | 0.00027 |
| | | for SHOXb | | AN | WARNING ENTRY !!!! | |
| | | protein. | | | | |
| 341 | AL008730 | Human DNA | 7.10E−21 | C40201 | artifact-warning | 0.001 |
| | | sequence *** | | | sequence (translated | |
| | | SEQUENCING | | | ALU class C)- human | |
| | | IN PROGRESS | | | | |
| | | *** from clone | | | | |
| | | 487J7; HTGS | | | | |
| | | phase 1. | | | | |
| 342 | U96629 | Human | 5.30E−23 | ALU1_HUM | !!!! ALU SUBFAMILY J | 3.80E−10 |
| | | chromosome 8 | | AN | WARNING ENTRY !!!! | |
| | | BAC clone | | | | |
| | | CIT987SK-2A8 | | | | |
| | | complete | | | | |
| | | sequence. | | | | |
| 343 | U95743 | Homo sapiens | 2.10E−24 | UROM_HUM | UROMODULIN | 1 |
| | | chromosome 16 | | AN | PRECURSOR (TAMM- | |
| | | BAC clone | | | HORSFALL URINARY | |
| | | CIT987-SK65D3, | | | GLYCOPROTEIN) | |
| | | complete | | | (THP)>PIR2:A30452 | |
| | | sequence. | | | uromodulin precursor- | |
| | | | | | human>GP:HUMUMOD | |
| | | | | | _1 Human uromodulin | |
| | | | | | (Tamm-Horsfall | |
| | | | | | glycoprotein) mRNA, | |
| | | | | | complete cds; | |
| | | | | | Uromodulin precursor | |
| 344 | U15972 | Mus musculus | 4.00E−25 | S20790 | extensin- | 0.34 |
| | | homeobox | | | almond>GP:PAEXTS_1 | |
| | | (Hoxa7) gene, | | | P; amygdalus mRNA for | |
| | | complete cds. | | | extensin | |
| 345 | U15972 | Mus musculus | 4.00E−25 | CA24_CAEE | COLLAGEN ALPHA | 0.1 |
| | | homeobox | | L | 2(IV) CHAIN | |
| | | (Hoxa7) gene, | | | PRECURSOR>GP:CEC | |
| | | complete cds. | | | OLA2IV_2 C; elegans | |
| | | | | | a2(IV) collagen gene; | |
| | | | | | Alternatively spliced | |
| | | | | | transcript | |
| 346 | Z66242 | H. sapiens CpG | 4.80E−26 | CEC35A5_8 | Caenorhabditis elegans | 7.70E−19 |
| | | island DNA | | | cosmid C35A5, complete | |
| | | genomic Mse1 | | | sequence; C35A5; 8; | |
| | | fragment, clone | | | CDNA EST yk31f6; 5 | |
| | | 84a4, reverse read | | | comes from this gene; | |
| | | cpg84a4.rt1a. | | | cDNA EST yk38h1; 3 | |
| | | | | | comes from this gene; | |
| | | | | | cDNA EST yk38h1; 5 | |
| | | | | | comes from this gene; | |
| 347 | L25331 | Rattus norvegicus | 3.90E−26 | LYSH_CHICK | PROCOLLAGEN- | 1.10E−43 |
| | | lysyl hydroxylase | | | LYSINE,2- | |
| | | mRNA, complete | | | OXOGLUTARATE 5- | |
| | | cds. | | | DIOXYGENASE | |
| | | | | | PRECURSOR (EC | |
| | | | | | 1.14.11.4) (LYSYL | |
| | | | | | HYDROXYLASE)>PIR | |
| | | | | | 2:A23742 procollagen- | |
| | | | | | lysine 5-dioxygenase (EC | |
| | | | | | 1.14.11.4) precursor- | |
| | | | | | chicken>GP:CHKLYH_{—} | |
| | | | | | 1 Chicken lysyl | |
| | | | | | hydroxylase mRNA, | |
| | | | | | complete cds | |
| 348 | L81569 | Drosophila | 3.30E−26 | CELC52B9_2 | Caenorhabditis elegans | 8.40E−29 |
| | | melanogaster | | | cosmid C52B9; Coded | |
| | | (subclone 2_d7 | | | for by C; elegans cDNA | |
| | | from P1 DS04260 | | | cm11d6; weakly similar | |
| | | (D68)) DNA | | | to S; cervisiae PTM1 | |
| | | sequence, | | | precursor (SP:P32857) | |
| | | complete | | | | |
| | | sequence. | | | | |
| 349 | U78082 | Human RNA | 2.30E−26 | HSU78082_1 | Human RNA polymerase | l.50E−16 |
| | | polymerase | | | transcriptional regulation | |
| | | transcriptional | | | mediator (h- MED6) | |
| | | regulation | | | mRNA, complete cds; H- | |
| | | mediator (h- | | | Med6p | |
| | | MED6) mRNA, | | | | |
| | | complete cds. | | | | |
| 350 | U43381 | Human Down | 2.10E−28 | HSMRNAEB_1 | H; sapiens genomic DNA, | 0.18 |
| | | Syndrome region | | | integration site for | |
| | | of chromosome | | | Epstein-Barr virus; | |
| | | 21 DNA. | | | Hypothetical protein | |
| 351 | D50416 | Mouse mRNA for | 2.50E−29 | A29947 | prostaglandin- | 0.81 |
| | | AREC3, | | | endoperoxide synthase | |
| | | complete cds. | | | (EC 1.14.99.1) precursor- | |
| | | | | | sheep>GP:SHPCOXA_1 | |
| | | | | | Sheep prostaglandin | |
| | | | | | endoperoxide synthetase | |
| | | | | | (cyclooxygenase), | |
| | | | | | complete cds; | |
| | | | | | Cyclooxygenase | |
| | | | | | precursor (EC 1; 14; 99; 1) | |
| 352 | U85193 | Human nuclear | 2.20E−29 | CFU30222_1 | Crithidia fasciculata fully | 0.53 |
| | | factor I-B2 | | | edited ATPase subunit 6 | |
| | | (NFIB2) mRNA, | | | (MURF4) mRNA, partial | |
| | | complete cds. | | | cds; Cryptogene | |
| 353 | Z92826 | Caenorhabditis | 1.10E−30 | SPAC1B3_5 | S; pombe chromosome I | 3.20E−35 |
| | | elegans DNA *** | | | cosmid c1B3; | |
| | | SEQUENCING | | | Hypothetical protein; | |
| | | IN PROGRESS | | | SPAC1B3; 05, probable | |
| | | *** from clone | | | transcriptional regulator, | |
| | | C18D11; HTGS | | | len:630aa, similar eg; to | |
| | | phase 1. | | | YIL038C, | |
| | | | | | NOT3_YEAST, P06102, | |
| | | | | | general negative | |
| | | | | | regulator, | |
| 354 | L09604 | Homo sapiens | 3.70E−32 | PVU72769_1 | Phaseolus vulgaris | 0.00049 |
| | | differentiation- | | | PvPRP-12 (Pvprp1-12) | |
| | | dependent A4 | | | mRNA, partial cds; | |
| | | protein mRNA, | | | Similar to cell wall | |
| | | complete cds. | | | proline rich | |
| | | | | | protein>GP:PVU72769_{—} | |
| | | | | | 1 Phaseolus vulgaris | |
| | | | | | PvPRP-12 (Pvprp1-12) | |
| | | | | | mRNA, partial cds; | |
| | | | | | Similar to cell wall | |
| | | | | | proline rich protein | |
| 355 | B42455 | HS-1055-B2- | 1.30E−32 | CELT05H4_8 | Caenorhabditis elegans | 6.90E−14 |
| | | G03-MR.abi CIT | | | cosmid T05H4; Similar | |
| | | Human Genomic | | | to the beta transducin | |
| | | Sperm Library C | | | family; coded for by C; | |
| | | Homo sapiens | | | elegans cDNA | |
| | | genomic clone | | | yk156e11; 3; coded for by | |
| | | Plate'2 CT 777 | | | C; elegans cDNA | |
| | | Col'2 6 Row'2 N. | | | yk14c8; 3; coded for by | |
| | | | | | C; elegans cDNA | |
| 356 | AF001905 | Homo sapiens | 1.80E−33 | I38344 | titin - human | 1 |
| | | cosmids E079, | | | | |
| | | B0920 and A8 | | | | |
| | | from Xq25 X- | | | | |
| | | linked | | | | |
| | | lymphoproliferative | | | | |
| | | disease gene | | | | |
| | | candidate region, | | | | |
| | | complete | | | | |
| | | sequence. | | | | |
| 357 | E03743 | DNA sequence | 1.10E−34 | CELC03A7_2 | Caenorhabditis elegans | 0.59 |
| | | including male | | | cosmid C03A7; Weak | |
| | | hormone | | | similarity to serotonin | |
| | | dependent gene | | | receptors | |
| | | derived from | | | | |
| | | hamster | | | | |
| | | frankorgan. | | | | |
| 358 | U31199 | Human laminin | 1.20E−35 | B44018 | laminin B2t chain - | 1.20E−14 |
| | | gamma2 chain | | | human>GP:HSLAMB2T | |
| | | gene (LAMC2), | | | B_1 H; sapiens mRNA | |
| | | exon 22 and | | | for laminin | |
| | | flanking | | | | |
| | | sequences. | | | | |
| 359 | D14678 | Human mRNA | 2.00E−36 | D49544_1 | Mouse mRNA for | 1.20E−23 |
| | | for kinesin- | | | KIFC1, complete cds | |
| | | related protein, | | | | |
| | | partial cds. | | | | |
| 360 | AB000425 | Porcine DNA for | 8.20E−38 | POL4_DROME | RETROVIRUS- | 0.65 |
| | | endopeptidase | | | RELATED POL | |
| | | 24.16, exon 16 | | | POLYPROTEIN | |
| | | and complete cds. | | | (PROTEASE (EC | |
| | | | | | 3.4.23.-); REVERSE | |
| | | | | | TRANSCRIPTASE (EC | |
| | | | | | 2.7.7.49); | |
| | | | | | ENDONUCLEASE) | |
| | | | | | (TRANSPOSON | |
| | | | | | 412)>PIR1:GNFF42 | |
| | | | | | retrovirus-related pol | |
| | | | | | polyprotein - fruit fly | |
| | | | | | (Drosophila | |
| | | | | | melanogaster) transposon | |
| | | | | | 412>GP:DMRT412G_4 | |
| 361 | U39875 | Rattus norvegicus | 8.80E−42 | I56333 | apolipoprotein B - rat | 0.23 |
| | | EF-hand Ca2+- | | | (fragment)>GP:RATAP | |
| | | binding protein | | | OLPB_1 Rattus | |
| | | p22 mRNA, | | | norvegicus (clone rb9E) | |
| | | complete cds. | | | apolipoprotein B apoB | |
| | | | | | mRNA, 3′ end | |
| 362 | L09647 | Rattus norvegicus | 6.60E−42 | HN3B_RAT | HEPATOCYTE | 8.10E−25 |
| | | hepatocyte | | | NUCLEAR FACTOR 3- | |
| | | nuclear factor 3a | | | BETA (HNF- | |
| | | (HNF-3 beta) | | | 3B)>GP:RATHNF3B_1 | |
| | | mRNA, complete | | | Rattus norvegicus | |
| | | cds. | | | hepatocyte nuclear factor | |
| | | | | | 3a (HNF-3 beta) mRNA, | |
| | | | | | complete | |
| | | | | | cds>TFD:TFDP01611 - | |
| | | | | | Polypeptides entry for | |
| | | | | | factor HNF-3 (beta) | |
| 363 | D25538 | Human mRNA | 4.10E−43 | CELC34D4_12 | Caenorhabditis elegans | 0.018 |
| | | for KIAA0037 | | | cosmid C34D4 | |
| | | gene, complete | | | | |
| | | cds. | | | | |
| 364 | Z56764 | H. sapiens CpG | 1.40E−43 | S75263 | hypothetical protein- | 0.0028 |
| | | island DNA | | | Synechocystis sp. (PCC | |
| | | genomic Mse1 | | | 6803)>GP:D90904_29 | |
| | | fragment, clone | | | Synechocystis sp; | |
| | | 13f7, reverse read | | | PCC6803 complete | |
| | | cpg13f7.rt1a. | | | genome, 6/27, 630555- | |
| | | | | | 781448; Hypothetical | |
| | | | | | protein; ORF_ID:sll0983 | |
| 365 | AC002636 | *** | 8.40E−44 | DMU95760_1 | Drosophila melanogaster | 3.40E−51 |
| | | SEQUENCING | | | strawberry notch (sno) | |
| | | IN PROGRESS | | | mRNA, complete cds; | |
| | | *** Drosophila | | | Notch pathway | |
| | | melanogaster | | | component; nuclear | |
| | | (subclone 2_g4 | | | protein | |
| | | from P1 DS03323 | | | | |
| | | (D127)) DNA | | | | |
| | | sequence; HTGS | | | | |
| | | phase 2. | | | | |
| 366 | J05499 | Rattus norvegicus | 8.00E−44 | GLSL_RAT | GLUTAMINASE, | 8.00E−29 |
| | | L-glutamine | | | LIVER ISOFORM | |
| | | amidohydrolase | | | PRECURSOR (EC | |
| | | mRNA, complete | | | 3.5.1.2) | |
| | | cds. | | | (GLS)>GP:RATGAH_1 | |
| | | | | | Rattus norvegicus L- | |
| | | | | | glutamine | |
| | | | | | amidohydrolase mRNA, | |
| | | | | | complete cds | |
| 367 | U95760 | Drosophila | 5.00E−45 | DMU95760_1 | Drosophila melanogaster | 4.80E−45 |
| | | melanogaster | | | strawberry notch (sno) | |
| | | strawberry notch | | | mRNA, complete cds; | |
| | | (sno) mRNA, | | | Notch pathway | |
| | | complete cds. | | | component; nuclear | |
| | | | | | protein | |
| 368 | L10106 | Mus musculus | 4.10E−45 | PTPK_HUMAN | PROTEIN-TYROSINE | 4.70E−16 |
| | | protein tyrosine | | | PHOSPHATASE | |
| | | phosphate | | | KAPPA PRECURSOR | |
| | | mRNA, complete | | | (EC 3.1.3.48) (R-PTP- | |
| | | cds. | | | KAPPA)>GP:HSPTPKA | |
| | | | | | P_1 H; sapiens mRNA for | |
| | | | | | phosphotyrosine | |
| | | | | | phosphatase kappa; | |
| | | | | | Human phosphotyrosine | |
| | | | | | phosphatase kappa | |
| 369 | D17218 | Human HepG2 3′ | 9.40E−47 | MMU53563_1 | Mus musculus Brg1 | 0.00012 |
| | | region MboI | | | mRNA, partial cds; N- | |
| | | cDNA, clone | | | terminal region of the | |
| | | hmd3g02m3. | | | protein | |
| 370 | U78310 | Homo sapiens | 8.10E−48 | HSU78310_1 | Homo sapiens pescadillo | 1.10E−21 |
| | | pescadillo | | | mRNA, complete cds | |
| | | mRNA, complete | | | | |
| | | cds. | | | | |
| 371 | AC000399 | Genomic | 7.40E−48 | KIP2_YEAST | KINESIN-LIKE | 0.14 |
| | | sequence from | | | PROTEIN | |
| | | Mouse 9, | | | KIP2>PIR1:C42640 | |
| | | complete | | | kinesin-related protein | |
| | | sequence. | | | KIP2- yeast | |
| | | | | | (Saccharomyces | |
| | | | | | cerevisiae)>GP:SCKIP2 | |
| | | | | | XVI_2 S; cerevisiae PEP4 | |
| | | | | | and KIP2 genes encoding | |
| | | | | | PEP4 proteinase (partial) | |
| | | | | | and kinesin-related | |
| | | | | | protein | |
| | | | | | KIP2>GP:SCLACHXVI | |
| | | | | | _17 S; cerev | |
| 372 | AC002327 | *** | 1.40E−48 | CHKC1A205_1 | Chicken alpha-2 type−1 | 0.024 |
| | | SEQUENCING | | | collagen; amino acids- 16 | |
| | | IN PROGRESS | | | to 3; Precollagen alpha-2 | |
| | | *** Genomic | | | | |
| | | sequence from | | | | |
| | | Mouse 7; HTGS | | | | |
| | | phase 1, 3 | | | | |
| | | unordered pieces. | | | | |
| 373 | X67016 | H. sapiens mRNA | 9.00E−49 | CED2085_2 | Caenorhabditis elegans | 0.14 |
| | | for amphiglycan. | | | cosmid D2085, complete | |
| | | | | | sequence; D2085; 1; | |
| | | | | | Similar to glutamine− | |
| | | | | | dependent carbamoyl- | |
| | | | | | phosphate synthase, | |
| | | | | | aspartate | |
| | | | | | carbamoyltransferase, | |
| | | | | | dihydroorotase; cDNA | |
| | | | | | EST | |
| | | | | | cm16f3>GP:CED2085_2 | |
| | | | | | Caenorhabditis elegans | |
| | | | | | cosmid D2085; D | |
| 374 | L10409 | Mouse fork head | 1.50E−49 | MMU04197_1 | Mus musculus HNF3 | 1.20E−30 |
| | | related protein | | | beta transcription factor | |
| | | (HNF-3beta) | | | (HNF3b) mRNA, partial | |
| | | mRNA, complete | | | cds; Sequence of this | |
| | | cds. | | | partial cDNA begins in | |
| | | | | | the first third of the | |
| | | | | | conserved | |
| | | | | | HNF3/forkhead DNA | |
| | | | | | binding domain | |
| 375 | U01139 | Mus musculus | 1.20E−49 | SPBC3D5_14 | S; pombe chromosome II | 0.00091 |
| | | B6D2F1 clone | | | cosmid c3D5; Unknown; | |
| | | 2C11B mRNA. | | | SPBC3D5; 14c, | |
| | | | | | unknown; partial; serine | |
| | | | | | rich, len:309aa, similar | |
| | | | | | eg; to YNL283C, | |
| | | | | | YN23_YEAST, P53832, | |
| | | | | | hypothetical 52; 3 kd | |
| | | | | | protein, (503aa), | |
| 376 | Z82170 | Human DNA | 9.00E−50 | BSU55043_3 | Bacillus subtilis plasmid | 0.025 |
| | | sequence from | | | pPOD2000 Rep, RapAB, | |
| | | PAC 326L13 | | | RapA, ParA, ParB, and | |
| | | containing brain- | | | ParC genes, complete | |
| | | 4 mRNA ESTs | | | cds; ORF3 | |
| | | and polymorphic | | | | |
| | | CA repeat. | | | | |
| 377 | Z99289 | Human DNA | 7.70E−50 | A64431 | hypothetical protein | 5.60E−05 |
| | | sequence *** | | | MJ1050- | |
| | | SEQUENCING | | | Methanococcus | |
| | | IN PROGRESS | | | jannaschii>GP:MJU6754 | |
| | | *** from clone | | | 8_2 Methanococcus | |
| | | 142L7; HTGS | | | jannaschii from bases | |
| | | phase 1. | | | 986219 to 996377 | |
| | | | | | (section 90 of 150) of the | |
| | | | | | complete genome; M; | |
| | | | | | jannaschii predicted | |
| | | | | | coding region MJ1050; | |
| | | | | | Identified by GeneMark; | |
| | | | | | putativ | |
| 378 | X98260 | H. sapiens mRNA | 6.20E−50 | ZRF1_MOUSE | ZUOTIN RELATED | 3.90E−30 |
| | | for M-phase | | | FACTOR>GP:MMU532 | |
| | | phosphoprotein, | | | 08_1 Mus musculus | |
| | | mpp11. | | | zuotin related factor | |
| | | | | | (ZRF1) mRNA, complete | |
| | | | | | cds; Similar to DnaJ | |
| | | | | | encoded by GenBank | |
| | | | | | Accession Number | |
| | | | | | L16953 | |
| 379 | M18981 | Human prolactin | 9.00E−52 | S106_HUMAN | CALCYCLIN | 8.80E−24 |
| | | receptor- | | | (PROLACTIN | |
| | | associated protein | | | RECEPTOR | |
| | | (PRA) gene, | | | ASSOCIATED | |
| | | complete cds. | | | PROTEIN) (PRA) | |
| | | | | | (GROWTH FACTOR- | |
| | | | | | INDUCIBLE PROTEIN | |
| | | | | | 2A9) (S100 CALCIUM- | |
| | | | | | BINDING PROTEIN | |
| | | | | | A6)>PIR1:BCHUY | |
| | | | | | calcyclin- | |
| | | | | | human>GP:HUMCACY | |
| | | | | | _1 Human calcyclin | |
| | | | | | gene, complete | |
| | | | | | cds>GP:HUMCACYA_1 | |
| | | | | | Human prolactin recept | |
| 380 | AB006622 | Homo sapiens | 1.60E−53 | S33015 | hypothetical protein- | 0.00088 |
| | | mRNA for | | | human herpesvirus 4 | |
| | | KIAA0284 gene, | | | | |
| | | partial cds. | | | | |
| 381 | U53225 | Human sorting | 1.80E−55 | G02522 | sorting nexin 1- | 9.20E−50 |
| | | nexin 1 (SNX1) | | | human>GP:HSU53225_1 | |
| | | mRNA, complete | | | Human sorting nexin 1 | |
| | | cds. | | | (SNX1) mRNA, | |
| | | | | | complete cds | |
| 382 | Z92844 | Human DNA | 6.50E−56 | D14487_1 | Lentinus edodes | 1 |
| | | sequence from | | | Le; MFB1 mRNA, | |
| | | PAC 435C23 on | | | complete cds | |
| | | chromosome X. | | | | |
| | | Contains ESTs. | | | | |
| 383 | D87450 | Human mRNA | 4.30E−56 | D87450_1 | Human mRNA for | 4.30E−30 |
| | | for KIAA0261 | | | KIAA0261 gene, partial | |
| | | gene, partial cds. | | | cds; Similar to | |
| | | | | | D; melanogaster parallel | |
| | | | | | sister chromatids protein | |
| 384 | AC002301 | *** | 9.80E−57 | S62328 | kinesin-like DNA | 2.60E−27 |
| | | SEQUENCING | | | binding protein KID- | |
| | | IN PROGRESS | | | human>GP:HUMKID_1 | |
| | | *** Human | | | Human mRNA for Kid | |
| | | chromosome + | | | (kinesin-like DNA | |
| | | 16p11.2 BAC | | | binding protein), | |
| | | clone CIT987SK- | | | complete cds | |
| | | A-328A3; HTGS | | | | |
| | | phase 2, 1 | | | | |
| | | ordered pieces. | | | | |
| 385 | L29766 | Homo sapiens | 7.30E−57 | HSBCTCF4_1 | Homo sapiens mRNA for | 2.30E−05 |
| | | epoxide hydrolase | | | hTCF-4 | |
| | | (EPHX) gene, | | | | |
| | | complete cds. | | | | |
| 386 | U58884 | Mus musculus | 3.30E−58 | MMU58884_1 | Mus musculus SH3- | 6.00E−43 |
| | | SH3-containing | | | containing protein | |
| | | protein SH3P7 | | | SH3P7 mRNA, complete | |
| | | mRNA, complete | | | cds; similar to Human | |
| | | cds. similar to | | | Drebrin; SH3-containing | |
| | | Human Drebrin. | | | protein; similar to human | |
| | | | | | drebrin | |
| 387 | Y15054 | Rattus norvegicus | 9.50E−59 | RNY15054_1 | Rattus norvegicus mRNA | 4.70E−45 |
| | | mRNA for 70 | | | for 70 kDa tumor specific | |
| | | kDa tumor | | | antigen, partial; 70 kD | |
| | | specific antigen, | | | tumor-specific antigen | |
| | | partial. | | | | |
| 388 | AC000406 | *** | 7.40E−59 | <NONE> | <NONE> | <NONE> |
| | | SEQUENCING | | | | |
| | | IN PROGRESS | | | | |
| | | *** Human | | | | |
| | | Chromosome 11 | | | | |
| | | overlapping pacs | | | | |
| | | pDJ235k10 and | | | | |
| | | pDJ239b22; | | | | |
| | | HTGS phase 1, | | | | |
| | | 17 unordered | | | | |
| | | pieces. | | | | |
| 389 | L42612 | Homo sapiens | 3.60E−59 | KRHUEA | keratin, type II | 7.60E−30 |
| | | keratin 6 isoform | | | cytoskeletal - human | |
| | | K6f (KRT6F) | | | (fragment)>GP:HSKER | |
| | | mRNA, complete | | | A_1 Human messenger | |
| | | cds. | | | fragment encoding | |
| | | | | | cytoskeletal keratin (type | |
| | | | | | II); mRNA from cultured | |
| | | | | | epidermal cells from | |
| | | | | | human | |
| | | | | | foreskin>GP:HUMKER5 | |
| | | | | | 6K_1 Human 56k | |
| | | | | | cytoskeletal type II | |
| | | | | | keratin mRNA | |
| 390 | L29766 | Homo sapiens | 2.70E−60 | EGR2_HUMAN | EARLY GROWTH | 7.80E−06 |
| | | epoxide hydrolase | | | RESPONSE PROTEIN 2 | |
| | | (EPHX) gene, | | | (EGR-2) (KROX-20 | |
| | | complete cds. | | | PROTEIN) | |
| | | | | | (AT591)>GP:HUMEGR | |
| | | | | | 2A_1 Human early | |
| | | | | | growth response 2 | |
| | | | | | protein (EGR2) mRNA, | |
| | | | | | complete | |
| | | | | | cds>TFD:TFDP00485 - | |
| | | | | | Polypeptides entry for | |
| | | | | | factor Egr-2 | |
| 391 | L08758 | Mus musculus | 1.40E−60 | PAALGYGE | P; aeruginosa algY gene; | 0.00031 |
| | | homeobox protein | | N_1 | Alginate lyase | |
| | | (Hox A 10) gene, | | | | |
| | | 5′ end of cds. | | | | |
| 392 | I29058 | Sequence 3 from | 4.20E−61 | JC5106 | stromal cell-derived | 1.50E−32 |
| | | patent US | | | factor 2- | |
| | | 5576423. | | | human>GP:D50645_1 | |
| | | | | | Human mRNA for SDF2, | |
| | | | | | complete cds; Stroma | |
| | | | | | cell-derived factor-2 | |
| 393 | I29058 | Sequence 3 from | 4.20E−61 | JC5106 | stromal cell-derived | 1.50E−32 |
| | | patent US | | | factor 2 - | |
| | | 5576423. | | | human>GP:D50645_1 | |
| | | | | | Human mRNA for SDF2, | |
| | | | | | complete cds; Stroma | |
| | | | | | cell-derived factor-2 | |
| 394 | U46067 | Capra hircus | 1.90E−62 | CHU46067_1 | Capra hircus beta- | 2.70E−39 |
| | | beta-mannosidase | | | mannosidase mRNA, | |
| | | mRNA, complete | | | complete cds | |
| | | cds. | | | | |
| 395 | U40747 | Mus musculus | 6.90E−63 | S64713 | formin binding protein | 3.00E−46 |
| | | formin binding | | | 11 - mouse | |
| | | protein 11 | | | (fragment)>GP:MMU40 | |
| | | mRNA, partial | | | 747_1 Mus musculus | |
| | | cds. | | | formin binding protein | |
| | | | | | 11 mRNA, partial cds; | |
| | | | | | FBP 11; Formin binding | |
| | | | | | protein 11; tandem | |
| | | | | | WWP/WW domains | |
| | | | | | separated by 15 amino | |
| | | | | | acid linker | |
| 396 | M36164 | Human | 1.10E−63 | BHT1UL_12 | Bovine herpesvirus type | 0.003 |
| | | glyceraldehyde−3- | | | 1 UL22-35 genes; | |
| | | phosphate | | | UL26; 5>GP:BHU31809_{—} | |
| | | dehydrogenase | | | 2 Bovine herpesvirus 1 | |
| | | mRNA, 3′ flank. | | | maturational proteinase | |
| | | | | | (UL26) gene, complete | |
| | | | | | cds, and scaffold protein | |
| | | | | | (UL26; 5) gene, complete | |
| | | | | | cds | |
| 397 | Y09036 | H. sapiens | 7.30E−65 | MMU39060_1 | Mus musculus | 0.0054 |
| | | NTRK1 gene, | | | glucocorticoid receptor | |
| | | exon 17. | | | interacting protein 1 | |
| | | | | | (GRIP1) mRNA, | |
| | | | | | complete cds; Hormone− | |
| | | | | | dependent interaction | |
| | | | | | with hormone binding | |
| | | | | | domains of steroid | |
| | | | | | receptors; transactivation | |
| 398 | U17901 | Rattus norvegicus | 2.70E−70 | JC4239 | phospholipase A2- | 8.40E−17 |
| | | phospholipase A- | | | activating protein - rat | |
| | | 2-activating | | | | |
| | | protein (plap) | | | | |
| | | mRNA, complete | | | | |
| | | cds. | | | | |
| 399 | D12646 | Mouse kif4 | 1.70E−74 | KIF4_MOUSE | KINESIN-LIKE | 1.10E−44 |
| | | mRNA for | | | PROTEIN | |
| | | microtubule− | | | KIF4>PIR2:A54803 | |
| | | based motor | | | microtubule−associated | |
| | | protein KIF4, | | | motor KIF4 - | |
| | | complete cds. | | | mouse>GP:MUSKIF4_1 | |
| | | | | | Mouse kif4 mRNA for | |
| | | | | | microtubule−based motor | |
| | | | | | protein KIF4, complete | |
| | | | | | cds; ATP-binding site: | |
| | | | | | base980- 1037, motor | |
| | | | | | domain: base732- 1781, | |
| | | | | | alpha-helical co | |
| 400 | AF007860 | Xenopus laevis | 4.60E−75 | AF007862_1 | Mus musculus mm-Mago | 6.50E−68 |
| | | xl-Mago mRNA, | | | mRNA, complete cds; | |
| | | complete cds. | | | Similar to Drosophila | |
| | | | | | melanogaster Mago | |
| | | | | | protein | |
| 401 | I45565 | Sequence 15 from | 2.30E−82 | RNU57391_1 | Rattus norvegicus FceRI | 9.90E−42 |
| | | patent US | | | gamma-chain interacting | |
| | | 5637463. | | | protein SH2-B (SH2-B) | |
| | | | | | mRNA, complete cds; | |
| | | | | | Putative FceRI gamma | |
| | | | | | ITAM interacting | |
| | | | | | protein; SH2 domain- | |
| | | | | | containing protein B; | |
| | | | | | Method: conceptual | |
| 402 | U29156 | Mus musculus | 1.00E−85 | MMU29156_1 | Mus musculus eps15R | 4.90E−62 |
| | | eps15R mRNA, | | | mRNA, complete cds; | |
| | | complete cds. | | | Involved in signaling by | |
| | | | | | the epidermal growth | |
| | | | | | factor receptor; Method: | |
| | | | | | conceptual translation | |
| | | | | | supplied by author | |
| 403 | U70139 | Mus musculus | 1.00E−85 | MMU70139_1 | Mus musculus putative | 7.20E−66 |
| | | putative CCR4 | | | CCR4 protein mRNA, | |
| | | protein mRNA, | | | partial cds; Similar to | |
| | | partial cds. | | | yeast transcription factor | |
| | | | | | CCR4; transcriptional | |
| | | | | | readthrough occurs with | |
| | | | | | transcription being | |
| | | | | | initiated at the IAP and | |
| | | | | | continues | |
| 404 | U82626 | Rattus norvegicus | 7.60E−96 | RNU82626_1 | Rattus norvegicus | 8.20E−58 |
| | | basement | | | basement membrane− | |
| | | membrane− | | | associated chondroitin | |
| | | associated | | | proteoglycan Bamacan | |
| | | chondroitin | | | mRNA, complete cds; | |
| | | proteoglycan | | | Chondroitin sulfate | |
| | | Bamacan mRNA, | | | proteoglycan; CSPG | |
| | | complete cds. | | | | |
| 405 | L09604 | Homo sapiens | 2.00E−35 | <NONE> | <NONE> | <NONE> |
| | | differentiation- | | | | |
| | | dependent A4 | | | | |
| | | protein mRNA, | | | | |
| | | complete cds. | | | | |
| 406 | AB000516 | Homo sapiens | 0.41 | POLG_TUMVQ | GENOME | 2.9 |
| | | mRNA for DSIF | | | POLYPROTEIN | |
| | | p160, complete | | | (CONTAINS: N- | |
| | | cds | | | TERMINAL | |
| | | | | | PROTEIN; HELPER | |
| | | | | | COMPONENT | |
| | | | | | PROTEINASE (EC | |
| | | | | | 3.4.22.-) (HC-PRO); | |
| | | | | | 42-50 KD PROTEIN; | |
| | | | | | CYTOPLASMIC | |
| | | | | | INCLUSION | |
| | | | | | PROTEIN (CI); 6 KD | |
| | | | | | PROTEIN; VPG | |
| | | | | | PROTEIN; | |
| | | | | | NUCLEAR | |
| | | | | | INCLUSION | |
| | | | | | PROTEIN A (NI-A) | |
| 407 | Z94753 | Human DNA | 0.004 | <NONE> | <NONE> | <NONE> |
| | | sequence from | | | | |
| | | PAC 465G10 on | | | | |
| | | chromosome X | | | | |
| | | contains Menkes | | | | |
| | | Disease (ATP7A) | | | | |
| | | putative Cu++- | | | | |
| | | transporting P- | | | | |
| | | type ATPase | | | | |
| | | exons 22, 23 and | | | | |
| | | STS | | | | |
| 408 | AB011123 | Homo sapiens | 0 | MI15_CAEEL | Q23356 | 2.00E−51 |
| | | mRNA for | | | Caenorhabditis | |
| | | KIAA0551 | | | elegans . | |
| | | protein, partial | | | serine/threonine− | |
| | | cds | | | protein kinase mig-15 | |
| | | | | | (ec 2.7.1.-). 11/98 | |
| 409 | D17218 | Human HepG2 3′ | e−123 | NARG_BACSU | NITRATE | 9.9 |
| | | region MboI | | | REDUCTASE | |
| | | cDNA, clone | | | ALPHA CHAIN (EC | |
| | | hmd3g02m3 | | | 1.7.99.4) | |
| 410 | M95098 | Bos taurus | 1.1 | HAIR_MOUSE | HAIRLESS | 8.00E−10 |
| | | lysozyme gene | | | PROTEIN | |
| | | (cow 2), complete | | | | |
| | | cds | | | | |
| 411 | Z60048 | H. sapiens CpG | 4.00E−54 | HN3B_MOUSE | HEPATOCYTE | 4.00E−21 |
| | | DNA, clone | | | NUCLEAR FACTOR | |
| | | 187a9, reverse | | | 3-BETA (HNF-3B) | |
| | | read | | | | |
| | | cpg187a9.rt1a. | | | | |
| 412 | Z48975 | P. magnus gene | 0.014 | YPT2_CAEEL | HYPOTHETICAL | 2.00E−12 |
| | | for protein urPAB | | | 21.6 KD PROTEIN | |
| | | | | | F37A4.2 IN | |
| | | | | | CHROMOSOME III | |
| 413 | AJ001296 | Notophthalmus | 0.37 | YA53_SCHPO | HYPOTHETICAL | 5.00E−21 |
| | | viridescens | | | 24.2 KD PROTEIN | |
| | | mRNA for | | | C13A11.03 IN | |
| | | cytokeratin 8 | | | CHROMOSOME I | |
| 414 | J03831 | Xenopus laevis | 0.37 | PDR5_YEAST | SUPPRESSOR OF | 3.3 |
| | | (clone pXEC1.3) | | | TOXICITY OF | |
| | | C protein mRNA, | | | SPORIDESMIN | |
| | | complete cds. | | | | |
| 415 | AB007157 | Homo sapiens | e−142 | RS21_HUMAN | 40S RIBOSOMAL | 0.002 |
| | | gene for | | | PROTEIN S21 | |
| | | ribosomal protein | | | | |
| | | S21, partial cds | | | | |
| 416 | X86340 | H. sapiens C7 | 3.3 | STC_DROME | SHUTTLE CRAFT | 4.3 |
| | | gene, exon 13 | | | PROTEIN | |
| 417 | U12404 | Human Csa-19 | 0 | R10A_PIG | 60S RIBOSOMAL | 9.00E−57 |
| | | mRNA, complete | | | PROTEIN L10A | |
| | | cds. | | | (CSA-19) | |
| | | | | | (FRAGMENT) | |
| 418 | U95102 | Xenopus laevis | 8.00E−08 | <NONE> | <NONE> | <NONE> |
| | | mitotic | | | | |
| | | phosphoprotein | | | | |
| | | 90 mRNA, | | | | |
| | | complete cds | | | | |
| 419 | M80198 | Human FKBP-12 | 5.00E−14 | RCO1_NEUCR | TRANSCRIPTIONA | 0.008 |
| | | pseudogene, clone | | | L REPRESSOR RCO-1 | |
| | | lambda-512, 5′ | | | | |
| | | flank and | | | | |
| | | complete cds. | | | | |
| 420 | AF052573 | Homo sapiens | 0 | <NONE> | <NONE> | <NONE> |
| | | DNA polymerase | | | | |
| | | eta (POLH) | | | | |
| | | mRNA, complete | | | | |
| | | cds | | | | |
| 421 | AF035940 | Homo sapiens | e−131 | MGN_DROME | MAGO NASHI | 4.00E−39 |
| | | MAGOH mRNA, | | | PROTEIN | |
| | | complete cds | | | | |
| 422 | AF054994 | Homo sapiens | 0.12 | <NONE> | <NONE> | <NONE> |
| | | clone 23832 | | | | |
| | | mRNA sequence | | | | |
| 423 | U95098 | Xenopus laevis | 6.00E−05 | <NONE> | <NONE> | <NONE> |
| | | mitotic | | | | |
| | | phosphoprotein | | | | |
| | | 44 mRNA, partial | | | | |
| | | cds | | | | |
| 424 | U95094 | Xenopus laevis | 7.00E−07 | <NONE> | <NONE> | <NONE> |
| | | XL-INCENP | | | | |
| | | (XL-INCENP) | | | | |
| | | mRNA, complete | | | | |
| | | cds | | | | |
| 425 | D43952 | Mouse gene for | 0.36 | <NONE> | <NONE> | <NONE> |
| | | reticulocalbin, | | | | |
| | | exon 1 and | | | | |
| | | promoter region | | | | |
| 426 | X68553 | C. elegans | 0.4 | TCB1_RABIT | T-CELL RECEPTOR | 0.11 |
| | | repetitive DNA | | | BETA CHAIN | |
| | | sequence | | | PRECURSOR (ANA | |
| | | | | | 11) | |
| 427 | M83314 | Tomato | 3.3 | SMB2_HUMAN | DNA-BINDING | 0.65 |
| | | phenylalanine | | | PROTEIN SMUBP-2 | |
| | | ammonia lyase | | | (GLIAL FACTOR-1) | |
| | | (pal) gene, | | | (GF-1) | |
| | | complete cds and | | | | |
| | | promoter region. | | | | |
| 428 | AF070636 | Homo sapiens | 5.00E−23 | <NONE> | <NONE> | <NONE> |
| | | clone 24686 | | | | |
| | | mRNA sequence | | | | |
| 429 | <NONE> | <NONE> | <NONE> | IQGA_HUMAN | RAS GTPASE− | 2.00E−06 |
| | | | | | ACTIVATING-LIKE | |
| | | | | | PROTEIN IQGAP1 | |
| | | | | | (P195) | |
| 430 | AF068627 | Mus musculus | 5.00E−04 | LOX1_LENCU | LIPOXYGENASE | 9.9 |
| | | DNA cytosine−5 | | | (EC 1.13.11.12) | |
| | | methyltransferase | | | | |
| | | 3B2 (Dnmt3b) | | | | |
| | | mRNA, | | | | |
| | | alternatively | | | | |
| | | spliced, complete | | | | |
| | | cds | | | | |
| 431 | AF020043 | Homo sapiens | 0 | YJH4_YEAST | HYPOTHETICAL | 4.00E−16 |
| | | chromosome− | | | 141.3 KD PROTEIN | |
| | | associated | | | IN SCP160-MRPL8 | |
| | | polypeptide | | | INTERGENIC | |
| | | | | | REGION | |
| 432 | K00046 | ross river virus | 0.12 | CUL2_HUMAN | CULLIN HOMOLOG | 7.4 |
| | | 26s subgenomic | | | 2 (CUL-2) | |
| | | rna and junction | | | | |
| | | region. | | | | |
| 433 | AF005664 | Homo sapiens | 0.005 | UL88_HCMVA | PROTEIN UL88 | 5.8 |
| | | properdin (PFC) | | | | |
| | | gene, complete | | | | |
| | | cds | | | | |
| 434 | Z70705 | H. sapiens mRNA | 2.00E−05 | PH87_YEAST | INORGANIC | 1.5 |
| | | (fetal brain cDNA | | | PHOSPHATE | |
| | | com5) | | | TRANSPORTER | |
| | | | | | PHO87 | |
| 435 | U29156 | Mus musculus | e−125 | EP15_HUMAN | EPIDERMAL | 1.00E−13 |
| | | eps15R mRNA, | | | GROWTH FACTOR | |
| | | complete cds. | | | RECEPTOR | |
| | | | | | SUBSTRATE | |
| | | | | | SUBSTRATE 15 | |
| | | | | | (PROTEIN EPS 15) | |
| | | | | | (AF-1P PROTEIN) | |
| 436 | AE000750 | Aquifex aeolicus | 0.37 | <NONE> | <NONE> | <NONE> |
| | | section 82 of 109 | | | | |
| | | of the complete | | | | |
| | | genome | | | | |
| 437 | U49169 | Dictyostelium | 0.12 | VCAP_HSV6U | MAJOR CAPSID | 5.6 |
| | | discoideum V- | | | PROTEIN (MCP) | |
| | | ATPase A subunit | | | | |
| | | (vatA) mRNA, | | | | |
| | | complete cds | | | | |
| 438 | AF032871 | Homo sapiens | 0.13 | WEE1_SCHPO | MITOSIS | 3.7 |
| | | uncoupling | | | INHIBITOR | |
| | | protein 3 (UCP3) | | | PROTEIN KINASE | |
| | | gene, exon 1 and | | | WEE1 (EC 2.7.1.-) | |
| | | partial exon 2 | | | | |
| 439 | AB000425 | Porcine DNA for | 4.00E−32 | <NONE> | <NONE> | <NONE> |
| | | endopeptidase | | | | |
| | | 24.16, exon 16 | | | | |
| | | and complete cds | | | | |
| 440 | U51037 | Mus musculus 11- | 0.04 | <NONE> | <NONE> | <NONE> |
| | | zinc-finger | | | | |
| | | transcription | | | | |
| | | factor | | | | |
| 441 | AF032456 | Homo sapiens | e−110 | <NONE> | <NONE> | <NONE> |
| | | ubiquitin | | | | |
| | | conjugating | | | | |
| | | enzyme G2 | | | | |
| 442 | AF009288 | Homo sapiens | 2.00E−14 | LMG1_HUMAN | LAMININ GAMMA- | 8.1 |
| | | clone HEB8 Cri- | | | 1 CHAIN | |
| | | du-chat region | | | PRECURSOR | |
| | | mRNA | | | (LAMININ B2 | |
| | | | | | CHAIN) | |
| 443 | AF024578 | Homo sapiens | 1.1 | <NONE> | <NONE> | <NONE> |
| | | type−1 protein | | | | |
| | | phosphatase | | | | |
| | | skeletal muscle | | | | |
| | | glycogen | | | | |
| | | targeting subunit | | | | |
| | | (PPP1R3) gene, | | | | |
| | | exon 4, and | | | | |
| | | complete cds | | | | |
| 444 | M24486 | Human prolyl 4- | 0 | DACHA | <NONE> | 4.00E−58 |
| | | hydroxylase alpha | | | | |
| | | subunit mRNA, | | | | |
| | | complete cds, | | | | |
| | | clone PA-11. | | | | |
| 445 | X96400 | P. tetraurelia | 0.37 | <NONE> | <NONE> | <NONE> |
| | | alpha-51D gene | | | | |
| 446 | <NONE> | <NONE> | <NONE> | <NONE> | <NONE> | <NONE> |
| 447 | X84996 | X. laevis mRNA | 0.12 | POL_MLVRD | POL POLYPROTEIN | 2.00E−08 |
| | | for selenocysteine | | | (PROTEASE (EC | |
| | | tRNA acting | | | 3.4.23.-); REVERSE | |
| | | factor (Staf) | | | TRANSCRIPTASE | |
| | | | | | (EC 2.7.7.49); | |
| | | | | | RIBONUCLEASE H | |
| | | | | | (EC 3.1.26.4)) | |
| 448 | AF019980 | Dictyostelium | 3.4 | HMDL_BRAFL | HOMEOBOX | 0.23 |
| | | discoideum ZipA | | | PROTEIN DLL | |
| | | (zipA) gene, | | | HOMOLOG | |
| | | partial cds | | | | |
| 449 | X78424 | D. carota (Queen | 0.38 | <NONE> | <NONE> | <NONE> |
| | | Anne's Lace) | | | | |
| | | Inv*Dc2 gene, | | | | |
| | | 3432 bp | | | | |
| 450 | <NONE> | <NONE> | <NONE> | <NONE> | <NONE> | <NONE> |
| 451 | X89886 | P. patens mRNA | 1.1 | CKR6_HUMAN | C-C CHEMOKINE | 9.9 |
| | | for 5- | | | RECEPTOR TYPE 6 | |
| | | aminolevulinate | | | (C-C CKR-6) (CCR6) | |
| | | dehydratase | | | | |
| 452 | U67471 | Methanococcus | 0.12 | YR72_ECOLI | HYPOTHETICAL | 5.8 |
| | | jannaschii section | | | 53.2 KD PROTEIN | |
| | | 13 of 150 of the | | | (ORF2) (RETRON | |
| | | complete genome | | | EC67) | |
| 453 | AF060246 | Mus musculus | 1.00E−62 | YOJ8_CAEEL | HYPOTHETICAL | 1.7 |
| | | strain C57BL/6 | | | 51.6 KD PROTEIN | |
| | | zinc finger protein | | | ZK353.8 IN | |
| | | 106 (Zfp106) | | | CHROMOSOME III | |
| | | mRNA, H3a-a | | | | |
| | | allele, complete | | | | |
| | | cds | | | | |
| 454 | U70667 | Human Fas-ligand | 0 | YKB2_YEAST | HYPOTHETICAL | 3.00E−09 |
| | | associated factor | | | 69.1 KD PROTEIN | |
| | | 1 mRNA, partial | | | IN PUT3-CCE1 | |
| | | cds | | | INTERGENIC | |
| | | | | | REGION | |
| 455 | M95858 | Bos taurus | 0.35 | GIDA_MYCGE | GLUCOSE | 1.4 |
| | | recoverin mRNA, | | | INHIBITED | |
| | | complete cds. | | | DIVISION PROTEIN | |
| | | | | | A | |
| 456 | U67594 | Methanococcus | 0.36 | <NONE> | <NONE> | <NONE> |
| | | jannaschii section | | | | |
| | | 136 of 150 of the | | | | |
| | | complete genome | | | | |
| 457 | X06747 | Human hnRNP | 3.00E−31 | <NONE> | <NONE> | <NONE> |
| | | core protein A1 | | | | |
| 458 | Z65575 | H. sapiens CpG | 1.3 | <NONE> | <NONE> | <NONE> |
| | | DNA, clone 47c5, | | | | |
| | | reverse read | | | | |
| | | cpg47c5.rt1a. | | | | |
| 459 | X88893 | C. jacchus intron 4 | 5.00E−15 | <NONE> | <NONE> | <NONE> |
| | | of visual pigment | | | | |
| | | gene | | | | |
| 460 | M57426 | Maize stripe virus | 0.33 | DSC2_MOUSE | DESMOCOLLIN | 6.5 |
| | | RNA3 | | | 2A/2B PRECURSOR | |
| | | nonstructural | | | (EPITHELIAL TYPE | |
| | | protein | | | 2 DESMOCOLLIN) | |
| 461 | X01638 | Yeast TEF1 gene | 1.1 | PPOL_DROME | POLY (ADP- | 3.5 |
| | | for elongation | | | RIBOSE) | |
| | | factor EF-1 alpha | | | POLYMERASE (EC | |
| | | | | | 2.4.2.30) (PARP) | |
| 462 | M60064 | S. typhimurium | 1.1 | EPB4_MOUSE | EPHRIN TYPE−B | 2.5 |
| | | glutamate 1- | | | RECEPTOR 4 | |
| | | semialdehyde | | | PRECURSOR (EC | |
| | | aminotransferase | | | 2.7.1.112) KINASE 2) | |
| | | (hemL) gene, | | | (TYROSINE | |
| | | complete cds. | | | KINASE MYK- 1) | |
| 463 | X51508 | Rabbit mRNA for | 0.36 | ACHG_XENLA | ACETYLCHOLINE | 1.5 |
| | | aminopeptidase N | | | RECEPTOR | |
| | | (partial) | | | PROTEIN, GAMMA | |
| | | | | | CHAIN | |
| | | | | | PRECURSOR | |
| 464 | L10106 | Mus musculus | 2.00E−58 | VG13_BPML5 | GENE 13 PROTEIN | 2.5 |
| | | protein tyrosine | | | (GP 13) | |
| | | phosphate | | | | |
| | | mRNA, complete | | | | |
| | | cds. | | | | |
| 465 | M77235 | Human cardiac | 3.8 | ZPBOC1 | <NONE> | 6.9 |
| | | tetrodotoxin- | | | | |
| | | insensitive | | | | |
| | | voltage−dependent | | | | |
| | | sodium channel | | | | |
| | | alpha subunit | | | | |
| | | (HH1) mRNA, | | | | |
| | | complete cds. | | | | |
| 466 | M58330 | C. maltosa | 0.004 | EPB4_MOUSE | EPHRIN TYPE−B | 2.4 |
| | | autonomously | | | RECEPTOR 4 | |
| | | replicating | | | PRECURSOR (EC | |
| | | sequence. | | | 2.7.1.112) KINASE 2) | |
| | | | | | (TYROSINE | |
| | | | | | KINASE MYK- 1) | |
| 467 | X51508 | Rabbit mRNA for | 0.35 | ACHG_XENLA | ACETYLCHOLINE | 2.4 |
| | | aminopeptidase N | | | RECEPTOR | |
| | | (partial) | | | PROTEIN, GAMMA | |
| | | | | | CHAIN | |
| | | | | | PRECURSOR | |
| 468 | L10106 | Mus musculus | 7.00E−59 | VGLI_PRVRI | GLYCOPROTEIN | 4.3 |
| | | protein tyrosine | | | GP63 PRECURSOR | |
| | | phosphate | | | | |
| | | mRNA, complete | | | | |
| | | cds. | | | | |
| 469 | U65939 | Azotobacter | 1.1 | TRUA_BACSP | Q45557 bacillus sp. | 0.001 |
| | | vinelandii GTPase | | | (strain ksm-64). trna | |
| | | (ftsA) gene, | | | pseudouridine | |
| | | partial cds, and | | | synthase a (ec | |
| | | ATP binding | | | 4.2.1.70) | |
| | | protein (ftsZ) | | | (pseudouridylate | |
| | | gene, complete | | | synthase i) | |
| | | cds | | | (pseudouridine | |
| | | | | | synthase i) (uracil | |
| | | | | | hydrolyase). 11/98 | |
| 470 | U51037 | Mus musculus 11- | 0.041 | <NONE > | <NONE> | <NONE> |
| | | zinc-finger | | | | |
| | | transcription | | | | |
| | | factor | | | | |
| 471 | M32685 | Human platelet | 3.6 | <NONE> | <NONE> | <NONE> |
| | | glycoprotein IIIa, | | | | |
| | | exon 14. | | | | |
| 472 | U82691 | Phrynocephalus | 1.1 | <NONE> | <NONE> | <NONE> |
| | | raddei CAS | | | | |
| | | 179770 NADH | | | | |
| | | dehydrogenase | | | | |
| | | subunit 1 (ND1), | | | | |
| | | partial cds, tRNA- | | | | |
| | | Gln, tRNA-Ile | | | | |
| | | and tRNA-Met, | | | | |
| | | NADH | | | | |
| | | dehydrogenase | | | | |
| | | subunit 2 tRNA- | | | | |
| | | Cys and tRNA- | | | | |
| | | Tyr and c... | | | | |
| 473 | D85430 | Mouse Murr1 | 0.12 | EPA5_CHICK | EPHRIN TYPE−A | 2.5 |
| | | mRNA, exon | | | RECEPTOR 5 | |
| | | | | | PRECURSOR (EC | |
| | | | | | 2.7.1.112) | |
| 474 | U20661 | Dictyostelium | 0.36 | YHL1_EBV | HYPOTHETICAL | 4.00E−04 |
| | | discoideum | | | BHLF1 PROTEIN | |
| | | unknown internal | | | | |
| | | repeat protein | | | | |
| | | gene, complete | | | | |
| | | cds, and unknown | | | | |
| | | orf1, orf2 and | | | | |
| | | orf3 genes, partial | | | | |
| | | cds | | | | |
| 475 | X56537 | Human novel | 0.04 | FA5_HUMAN | COAGULATION | 9.5 |
| | | homeobox mRNA | | | FACTOR V | |
| | | for a DNA | | | PRECURSOR | |
| | | binding protein | | | (ACTIVATED | |
| | | | | | PROTEIN C | |
| | | | | | COFACTOR) | |
| 476 | U32843 | Haemophilus | 5 | <NONE> | <NONE> | <NONE> |
| | | influenzae Rd | | | | |
| | | section 158 of 163 | | | | |
| | | of the complete | | | | |
| | | genome | | | | |
| 477 | U67554 | Methanococcus | 0.36 | <NONE> | <NONE> | <NONE> |
| | | jannaschii section | | | | |
| | | 96 of 150 of the | | | | |
| | | complete genome | | | | |
| 478 | AB004244 | Narke japonica | 1.1 | NIA1_ORYSA | NITRATE | 1.00E−07 |
| | | mRNA for Nj- | | | REDUCTASE 1 (EC | |
| | | synaphin 1b, | | | 1.6.6.1) (NR1) | |
| | | complete cds | | | | |
| 479 | AF075079 | Homo sapiens full | 1.00E−12 | <NONE> | <NONE> | <NONE> |
| | | length insert | | | | |
| | | cDNA YQ80A08 | | | | |
| 480 | AE000723 | Aquifex aeolicus | 1 | YKK0_YEAST | HYPOTHETICAL | 9.1 |
| | | section 55 of 109 | | | 67.5 KD PROTEIN | |
| | | of the complete | | | IN APE1/LAP4- | |
| | | genome | | | CWP1 INTERGENIC | |
| | | | | | REGION | |
| 481 | X73902 | H. sapiens mRNA | 0 | LMG2_HUMAN | LAMININ GAMMA- | 3.00E−93 |
| | | for nicein B2 | | | 2 CHAIN | |
| | | chain | | | PRECURSOR | |
| 482 | U95094 | Xenopus laevis | 3.00E−10 | P53_CRIGR | CELLULAR TUMOR | 5.7 |
| | | XL-INCENP | | | ANTIGEN P53 | |
| | | (XL-INCENP) | | | | |
| | | mRNA, complete | | | | |
| | | cds | | | | |
| 483 | AL010240 | Plasmodium | 1.2 | <NONE> | <NONE> | <NONE> |
| | | falciparum DNA | | | | |
| | | *** | | | | |
| | | SEQUENCING | | | | |
| | | IN PROGRESS | | | | |
| | | *** from contig | | | | |
| | | 4-64, complete | | | | |
| | | sequence | | | | |
| 484 | U49919 | Arabidopsis | 0.54 | YA53_SCHPO | HYPOTHETICAL | 6.00E−10 |
| | | thalian lupeol | | | 24.2 KD PROTEIN | |
| | | synthase mRNA, | | | C13A11.03 IN | |
| | | complete cds | | | CHROMOSOME I | |
| 485 | AF077618 | Homo sapiens | 0.39 | MYOD_MOUSE | MYOBLAST | 2.1 |
| | | p73 gene, exon 3 | | | DETERMINATION | |
| | | | | | PROTEIN 1 | |
| 486 | AF054994 | Homo sapiens | 0.13 | <NONE> | <NONE> | <NONE> |
| | | clone 23832 | | | | |
| | | mRNA sequence | | | | |
| 487 | U95102 | Xenopus laevis | 3.00E−10 | <NONE> | <NONE> | <NONE> |
| | | mitotic | | | | |
| | | phosphoprotein | | | | |
| | | 90 mRNA, | | | | |
| | | complete cds | | | | |
| 488 | AF068627 | Mus musculus | 5.00E−04 | ACE2_YEAST | METALLOTHIONEI | 1.5 |
| | | DNA cytosine−5 | | | N EXPRESSION | |
| | | methyltransferase | | | ACTIVATOR | |
| | | 3B2 (Dnmt3b) | | | | |
| | | mRNA, | | | | |
| | | alternatively | | | | |
| | | spliced, complete | | | | |
| | | cds | | | | |
| 489 | U95102 | Xenopus laevis | 3.00E−07 | RINI_PIG | RIBONUCLEASE | 0.19 |
| | | mitotic | | | INHIBITOR | |
| | | phosphoprotein | | | | |
| | | 90 mRNA, | | | | |
| | | complete cds | | | | |
| 490 | L77886 | Human protein | 1.00E−21 | VS48_TBRVS | SATELLITE RNA 48 | 1.6 |
| | | tyrosine | | | KD PROTEIN | |
| | | phosphatase | | | | |
| | | mRNA, complete | | | | |
| | | cds | | | | |
| 491 | U95098 | Xenopus laevis | 5.00E−04 | CRP3_LIMPO | C-REACTIVE | 3.5 |
| | | mitotic | | | PROTEIN 3.3 | |
| | | phosphoprotein | | | PRECURSOR | |
| | | 44 mRNA, partial | | | | |
| | | cds | | | | |
| 492 | U95094 | Xenopus laevis | 8.00E−08 | EPA5_CHICK | EPHRIN TYPE−A | 2.7 |
| | | XL-INCENP | | | RECEPTOR 5 | |
| | | (XL-INCENP) | | | PRECURSOR (EC | |
| | | mRNA, complete | | | 2.7.1.112) | |
| | | cds | | | | |
| 493 | U95094 | Xenopus laevis | 3.00E−09 | <NONE> | <NONE> | <NONE> |
| | | XL-INCENP | | | | |
| | | (XL-INCENP) | | | | |
| | | mRNA, complete | | | | |
| | | cds | | | | |
| 494 | U28153 | Caenorhabditis | 0.37 | <NONE> | <NONE> | <NONE> |
| | | elegans UNC-76 | | | | |
| | | (unc-76) gene, | | | | |
| | | complete cds. | | | | |
| 495 | U95094 | Xenopus laevis | 0.37 | NCPR_YEAST | NADPH- | 7.00E−05 |
| | | XL-INCENP | | | CYTOCHROME | |
| | | (XL-INCENP) | | | P450 REDUCTASE | |
| | | mRNA, complete | | | (EC 1.6.2.4) (CPR) | |
| | | cds | | | | |
| 496 | U95102 | Xenopus laevis | 0.013 | YMB3_CAEEL | PROBABLE | 3.3 |
| | | mitotic | | | INTEGRIN ALPHA | |
| | | phosphoprotein | | | CHAIN F54G8.3 | |
| | | 90 mRNA, | | | PRECURSOR | |
| | | complete cds | | | | |
| 497 | U95102 | Xenopus laevis | 7.00E−07 | <NONE> | <NONE> | <NONE> |
| | | mitotic | | | | |
| | | phosphoprotein | | | | |
| | | 90 mRNA, | | | | |
| | | complete cds | | | | |
| 498 | U95094 | Xenopus laevis | 1.00E−10 | <NONE> | <NONE> | <NONE> |
| | | XL-INCENP | | | | |
| | | (XL-INCENP) | | | | |
| | | mRNA, complete | | | | |
| | | cds | | | | |
| 499 | U95102 | Xenopus laevis | 2.00E−07 | VGLY_LYCVW | GLYCOPROTEIN | 3.2 |
| | | mitotic | | | POLYPROTEIN | |
| | | phosphoprotein | | | PRECURSOR | |
| | | 90 mRNA, | | | (CONTAINS: | |
| | | complete cds | | | GLYCOPROTEINS | |
| | | | | | G1 AND G2) | |
| 500 | U95098 | Xenopus laevis | 8.00E−06 | HR78_DROME | NUCLEAR | 2.5 |
| | | mitotic | | | HORMONE | |
| | | phosphoprotein | | | RECEPTOR HR78 | |
| | | 44 mRNA, partial | | | (DHR78) (NUCLEAR | |
| | | cds | | | RECEPTOR | |
| | | | | | XR78E/F) | |
| 501 | U95102 | Xenopus laevis | 9.00E−10 | MYSH_BOVIN | MYOSIN I HEAVY | 4.00E−04 |
| | | mitotic | | | CHAIN-LIKE | |
| | | phosphoprotein | | | PROTEIN (MIHC) | |
| | | 90 mRNA, | | | (BRUSH BORDER | |
| | | complete cds | | | MYOSIN I) (BBMI) | |
| 502 | U95094 | Xenopus laevis | 2.00E−04 | BAL_HUMAN | BILE−SALT- | 2.6 |
| | | XL-INCENP | | | ACTIVATED | |
| | | (XL-INCENP) | | | LIPASE | |
| | | mRNA, complete | | | PRECURSOR (EC | |
| | | cds | | | 3.1.1.3) (EC 3.1.1.13) | |
| | | | | | (BAL) (BILE−SALT- | |
| | | | | | STIMULATED | |
| | | | | | LIPASE) (BSSL) | |
| | | | | | ESTERASE) | |
| | | | | | (PANCREATIC | |
| | | | | | LYSOPHOSPHOLIP | |
| | | | | | ASE) | |
| 503 | AF080399 | Drosophila | 1.1 | NAT1_YEAST | N-TERMINAL | 2.00E−23 |
| | | melanogaster | | | ACETYLTRANSFER | |
| | | mitotic | | | ASE 1 (EC 2.3.1.88) | |
| | | checkpoint | | | | |
| | | control protein | | | | |
| | | kinase BUB1 | | | | |
| | | (Bub1) mRNA, | | | | |
| | | complete cds | | | | |
| 504 | U59706 | Gallus gallus | 0.014 | <NONE> | <NONE> | <NONE> |
| | | alternatively | | | | |
| | | spliced AMPA | | | | |
| | | glutamate | | | | |
| | | receptor, isoform | | | | |
| | | GluR2 flop, | | | | |
| | | (GluR2) mRNA, | | | | |
| | | partial cds. | | | | |
| 505 | U95094 | Xenopus laevis | 2.00E−05 | <NONE> | <NONE> | <NONE> |
| | | XL-INCENP | | | | |
| | | (XL-INCENP) | | | | |
| | | mRNA, complete | | | | |
| | | cds | | | | |
| 506 | U95098 | Xenopus laevis | 2.00E−04 | <NONE> | <NONE> | <NONE> |
| | | mitotic | | | | |
| | | phosphoprotein | | | | |
| | | 44 mRNA, partial | | | | |
| | | cds | | | | |
| 507 | AF100661 | Caenorhabditis | 0.38 | <NONE> | <NONE> | <NONE> |
| | | elegans cosmid | | | | |
| | | H20E11 | | | | |
| 508 | U95102 | Xenopus laevis | 3.00E−11 | CA1A_HUMAN | COLLAGEN ALPHA | 0.024 |
| | | mitotic | | | 1(X) CHAIN | |
| | | phosphoprotein | | | PRECURSOR | |
| | | 90 mRNA, | | | | |
| | | complete cds | | | | |
| 509 | U47322 | Cloning vector | 2.00E−38 | COA1_SV40 | COAT PROTEIN | 6.2 |
| | | DNA, complete | | | VP1 | |
| | | sequence. | | | | |
| 510 | AF031924 | Homo sapiens | e−156 | CCMA_HAEIN | HEME EXPORTER | 3.5 |
| | | homeobox | | | PROTEIN A | |
| | | transcription | | | (CYTOCHROME C- | |
| | | factor barx2 | | | TYPE BIOGENESIS | |
| | | | | | ATP-BINDING | |
| | | | | | PROTEIN CCMA) | |
| 511 | AF010484 | Homo sapiens ICI | 3.00E−10 | <NONE> | <NONE> | <NONE> |
| | | YAC 9IA12, right | | | | |
| | | end sequence | | | | |
| 512 | Z63829 | H. sapiens CpG | 5.00E−22 | NFIR_MESAU | NUCLEAR FACTOR | 2.4 |
| | | DNA, clone 90h2, | | | 1 CLONE | |
| | | forward read | | | PNF1/RED1 (NF-I) | |
| | | cpg90h2.ft1a. | | | (CCAAT-BOX | |
| | | | | | BINDING | |
| | | | | | TRANSCRIPTION | |
| | | | | | FACTOR) (CTF) | |
| | | | | | (TGGCA-BINDING | |
| | | | | | PROTEIN) | |
| 513 | Z35094 | H. sapiens mRNA | 5.00E−97 | SUR2_HUMAN | SURFEIT LOCUS | 1.00E−46 |
| | | for SURF-2 | | | PROTEIN 2 | |
| 514 | U95102 | Xenopus laevis | 7.00E−06 | <NONE> | <NONE> | <NONE> |
| | | mitotic | | | | |
| | | phosphoprotein | | | | |
| | | 90 mRNA, | | | | |
| | | complete cds | | | | |
| 515 | D38417 | Mouse mRNA for | e−154 | TEGU_EBV | LARGE TEGUMENT | 3.4 |
| | | arylhydrocarbon | | | PROTEIN | |
| | | receptor, | | | | |
| | | complete cds | | | | |
| 516 | L10911 | Homo sapiens | e−117 | <NONE> | <NONE> | <NONE> |
| | | splicing factor | | | | |
| | | (CC1.4) mRNA, | | | | |
| | | complete cds. | | | | |
| 517 | X17093 | Human HLA-F | 0.009 | YEN1_SCHPO | O13695 | 5.4 |
| | | gene for human | | | schizosaccharomyces | |
| | | leukocyte antigen F | | | pombe (fission yeast). | |
| | | | | | hypothetical 52.9 kd | |
| | | | | | serine−rich protein | |
| | | | | | c11g7.01 in | |
| | | | | | chromosome i. 11/98 | |
| 518 | AB017026 | Mus musculus | 0 | OXYB_HUMAN | OXYSTEROL- | 1.00E−40 |
| | | mRNA for | | | BINDING PROTEIN | |
| | | oxysterol-binding | | | | |
| | | protein, complete | | | | |
| | | cds | | | | |
| 519 | X55038 | Mouse mCENP-B | 0.001 | YNW7_YEAST | HYPOTHETICAL | 3.00E−04 |
| | | gene for | | | 68.8 KD PROTEIN | |
| | | centromere | | | IN URE2-SSU72 | |
| | | autoantigen B | | | INTERGENIC | |
| | | | | | REGION | |
| 520 | AB018323 | Homo sapiens | 3.00E−41 | LBR_CHICK | LAMIN B | 2.3 |
| | | mRNA for | | | RECEPTOR | |
| | | KIAA0780 | | | | |
| | | protein, partial | | | | |
| | | cds | | | | |
| 521 | U95094 | Xenopus laevis | 1.00E−10 | CA25_HUMAN | PROCOLLAGEN | 0.002 |
| | | XL-INCENP | | | ALPHA 2(V) CHAIN | |
| | | (XL-INCENP) | | | PRECURSOR | |
| | | mRNA, complete | | | | |
| | | cds | | | | |
| 522 | X03558 | Human mRNA | 0 | EF11_HUMAN | ELONGATION | e−110 |
| | | for elongation | | | FACTOR 1-ALPHA 1 | |
| | | factor 1 alpha | | | (EF-1-ALPHA-1) | |
| | | subunit | | | | |
| 523 | U95102 | Xenopus laevis | 3.00E−11 | YMT8_YEAST | HYPOTHETICAL | 8.00E−07 |
| | | mitotic | | | 36.4 KD PROTEIN | |
| | | phosphoprotein | | | IN NUP116-FAR3 | |
| | | 90 mRNA, | | | INTERGENIC | |
| | | complete cds | | | REGION | |
| 524 | AB014591 | Homo sapiens | 0 | NOT2_YEAST | GENERAL | 8.00E−05 |
| | | mRNA for | | | NEGATIVE | |
| | | KIAA0691 | | | REGULATOR OF | |
| | | protein, complete | | | TRANSCRIPTION | |
| | | cds | | | SUBUNIT 2 | |
| 525 | AB019488 | Homo sapiens | 0 | TRKA_HUMAN | HIGH AFFINITY | 2.00E−27 |
| | | DNA for TRKA, | | | NERVE GROWTH | |
| | | exon 17 and | | | FACTOR | |
| | | complete cds | | | RECEPTOR | |
| | | | | | PRECURSOR | |
| | | | | | PROTEIN) (P140- | |
| | | | | | TRKA) | |
| 526 | U95102 | Xenopus laevis | 5.00E−15 | CNG4_BOVIN | 240K PROTEIN OF | 0.018 |
| | | mitotic | | | ROD | |
| | | phosphoprotein | | | PHOTORECEPTOR | |
| | | 90 mRNA, | | | CNG-CHANNEL | |
| | | complete cds | | | CYCLIC- | |
| | | | | | NUCLEOTIDE− | |
| | | | | | GATED CATION | |
| | | | | | CHANNEL 4 (CNG | |
| | | | | | CHANNEL 4) | |
| | | | | | MODULATORY | |
| | | | | | SUBUNIT)) | |
| 527 | U95094 | Xenopus laevis | 2.00E−06 | HMZ1_DROME | ZERKNUELLT | 0.88 |
| | | XL-INCENP | | | PROTEIN 1 (ZEN-1) | |
| | | (XL-INCENP) | | | | |
| | | mRNA, complete | | | | |
| | | cds | | | | |
| 528 | J03750 | Mouse single | e−135 | P15_HUMAN | ACTIVATED RNA | 3.00E−21 |
| | | stranded DNA | | | POLYMERASE II | |
| | | binding protein p9 | | | TRANSCRIPTIONA | |
| | | mRNA, complete | | | L COACTIVATOR | |
| | | cds. | | | P15 (PC4) (P14) | |
| 529 | U95094 | Xenopus laevis | 1.00E−12 | RS5_DROME | 40S RIBOSOMAL | 0.42 |
| | | XL-INCENP | | | PROTEIN S5 | |
| | | (XL-INCENP) | | | | |
| | | mRNA, complete | | | | |
| | | cds | | | | |
| 530 | Z57610 | H. sapiens CpG | 8.00E−61 | HN3B_MOUSE | HEPATOCYTE | 4.00E−15 |
| | | DNA, clone | | | NUCLEAR FACTOR | |
| | | 187a10, reverse | | | 3-BETA (HNF-3B) | |
| | | read | | | | |
| | | cpg187a10.rt1a. | | | | |
| 531 | U95760 | Drosophila | 3.00E−60 | <NONE> | <NONE> | <NONE> |
| | | melanogaster | | | | |
| | | strawberry notch | | | | |
| | | (sno) mRNA, | | | | |
| | | complete cds | | | | |
| 532 | U95094 | Xenopus laevis | 4.00E−11 | <NONE> | <NONE> | <NONE> |
| | | XL-INCENP | | | | |
| | | (XL-INCENP) | | | | |
| | | mRNA, complete | | | | |
| | | cds | | | | |
| 533 | U50535 | Human BRCA2 | 4.00E−12 | ALU1_HUMAN | !!!ALU | 1.1 |
| | | region, mRNA | | | SUBFAMILY J | |
| | | sequence CG006 | | | WARNING ENTRY | |
| | | | | | !!! | |
| 534 | X92841 | H. sapiens MICA | 1.00E−55 | LIN1_HUMAN | LINE−1 REVERSE | 6.00E−09 |
| | | gene | | | TRANSCRIPTASE | |
| | | | | | HOMOLOG | |
| 535 | U60337 | Homo sapiens | 0 | NODC_BRAEL | N- | 1.4 |
| | | beta-mannosidase | | | ACETYLGLUCOSA | |
| | | mRNA, complete | | | MINYLTRANSFERA | |
| | | cds | | | SE (EC 2.4.1.-) | |
| 536 | M21731 | Human lipocortin- | e−169 | ANX5_HUMAN | ANNEXIN V | 1.00E−05 |
| | | V mRNA, | | | (LIPOCORTIN V) | |
| | | complete cds. | | | (ENDONEXIN II) | |
| | | | | | (CALPHOBINDIN I) | |
| | | | | | (CBP-I) | |
| | | | | | (PLACENTAL | |
| | | | | | ANTICOAGULANT | |
| | | | | | PROTEIN I) (PAP-I) | |
| | | | | | ANTICOAGULANT- | |
| | | | | | ALPHA) (VAC- | |
| | | | | | ALPHA) | |
| | | | | | (ANCHORIN CII) | |
| 537 | Y08013 | S. salar DNA | 0.006 | <NONE> | <NONE> | <NONE> |
| | | segment | | | | |
| | | containing GT | | | | |
| | | repeat | | | | |
| 538 | <NONE> | <NONE> | <NONE> | <NONE> | <NONE> | <NONE> |
| 539 | M98502 | Mus musculus | 2.00E−17 | DYNA_CHICK | DYNACTIN, 117 KD | 7.4 |
| | | protein encoding | | | ISOFORM | |
| | | twelve zinc finger | | | | |
| | | proteins (pMLZ- | | | | |
| | | 4) mRNA, | | | | |
| | | complete cds. | | | | |
| 540 | U95102 | Xenopus laevis | 6.00E−05 | HXA3_HAEIN | HEME:HEMOPEXIN | 2.6 |
| | | mitotic | | | -BINDING PROTEIN | |
| | | phosphoprotein | | | PRECURSOR | |
| | | 90 mRNA, | | | | |
| | | complete cds | | | | |
| 541 | U95094 | Xenopus laevis | 1.00E−13 | AMO_KLEAE | AMINE OXIDASE | 1.5 |
| | | XL-INCENP | | | PRECURSOR (EC | |
| | | (XL-INCENP) | | | 1.4.3.6) | |
| | | mRNA, complete | | | (MONAMINE | |
| | | cds | | | OXIDASE) | |
| | | | | | (TYRAMINE | |
| | | | | | OXIDASE) | |
| 542 | AF083322 | Homo sapiens | e−133 | CA34_HUMAN | PROCOLLAGEN | 1.5 |
| | | centriole | | | ALPHA 3(IV) | |
| | | associated protein | | | CHAIN | |
| | | CEP110 mRNA, | | | PRECURSOR | |
| | | complete cds | | | | |
| 543 | J03746 | Human | e−170 | GTMI_HUMAN | GLUTATHIONES- | 5.00E−39 |
| | | glutathione S- | | | TRANSFERASE, | |
| | | transferase | | | MICROSOMAL (EC | |
| | | mRNA, complete | | | 2.5.1.18) | |
| | | cds. | | | | |
| 544 | U67522 | Methanococcus | 0.37 | A1AA_HUMAN | ALPHA-1A | 4.3 |
| | | jannaschii section | | | ADRENERGIC | |
| | | 64 of 150 of the | | | RECEPTOR | |
| | | complete genome | | | | |
| 545 | U95102 | Xenopus laevis | 2.00E−07 | <NONE> | <NONE> | <NONE> |
| | | mitotic | | | | |
| | | phosphoprotein | | | | |
| | | 90 mRNA, | | | | |
| | | complete cds | | | | |
| 546 | <NONE> | <NONE> | <NONE> | <NONE> | <NONE> | <NONE> |
| 547 | <NONE> | <NONE> | <NONE> | <NONE> | <NONE> | <NONE> |
| 548 | D87001 | Human (lambda) | 0.35 | VAL3_TYLCU | AL3 PROTEIN (C3 | 3.2 |
| | | DNA for | | | PROTEIN) | |
| | | immunoglobulin | | | | |
| | | light chain | | | | |
| 549 | U95094 | Xenopus laevis | 3.00E−08 | TEGU_HSV11 | LARGE TEGUMENT | 0.004 |
| | | XL-INCENP | | | PROTEIN (VIRION | |
| | | (XL-INCENP) | | | PROTEIN UL36) | |
| | | mRNA, complete | | | | |
| | | cds | | | | |
| 550 | D16991 | Human HepG2 | 8.00E−09 | PTM1_YEAST | PROTEIN PTM1 | 0.033 |
| | | partial cDNA, | | | PRECURSOR | |
| | | clone | | | | |
| | | hmd2d01m5 | | | | |
| 551 | M34025 | Human fetal Ig | 3.2 | <NONE> | <NONE> | <NONE> |
| | | heavy chain | | | | |
| | | variable region | | | | |
| 552 | M98502 | Mus musculus | 5.00E−14 | <NONE> | <NONE> | <NONE> |
| | | protein encoding | | | | |
| | | twelve zinc finger | | | | |
| | | proteins (pMLZ- | | | | |
| | | 4) mRNA, | | | | |
| | | complete cds. | | | | |
| 553 | U95098 | Xenopus laevis | 0.002 | <NONE> | <NONE> | <NONE> |
| | | mitotic | | | | |
| | | phosphoprotein | | | | |
| | | 44 mRNA, partial | | | | |
| | | cds | | | | |
| 554 | Z78730 | H. sapiens flow- | 3.00E−20 | ALU1_HUMAN | !!!ALU | 5.00E−06 |
| | | sorted | | | SUBFAMILY J | |
| | | chromosome 6 | | | WARNING ENTRY | |
| | | HindIII fragment, | | | !!! | |
| | | SC6pA15C3 | | | | |
| 555 | U74496 | Human | 8.00E−08 | ICP4_VZVD | TRANS-ACTING | 0.39 |
| | | chromosome 4q35 | | | TRANSCRIPTIONA | |
| | | subtelomeric | | | L PROTEIN ICP4 | |
| | | sequence | | | | |
| 556 | U39875 | Rattus norvegicus | 2.00E−56 | YHFK_ECOLI | HYPOTHETICAL | 9.8 |
| | | EF-hand Ca2'0 - | | | 79.5 KD PROTEIN | |
| | | binding protein | | | IN CRP-ARGD | |
| | | p22 mRNA, | | | INTERGENIC | |
| | | complete cds. | | | REGION (O696) | |
| 557 | U65416 | Human MHC | 0.12 | <NONE> | <NONE> | <NONE> |
| | | class I molecule | | | | |
| | | (MICB) gene, | | | | |
| | | complete cds | | | | |
| 558 | AG000037 | Homo sapiens | 5.00E−25 | <NONE> | <NONE> | <NONE> |
| | | genomic DNA, | | | | |
| | | 21q region, clone: | | | | |
| | | 9H11A22 | | | | |
| 559 | U95102 | Xenopus laevis | 5.00E−05 | <NONE> | <NONE> | <NONE> |
| | | mitotic | | | | |
| | | phosphoprotein | | | | |
| | | 90 mRNA, | | | | |
| | | complete cds | | | | |
| 560 | AB007918 | Homo sapiens | 0.015 | VGLE_HSV11 | GLYCOPROTEIN E | 2.2 |
| | | mRNA for | | | PRECURSOR | |
| | | KIAA0449 | | | | |
| | | protein, partial | | | | |
| | | cds | | | | |
| 561 | U58884 | Mus musculus | 1.00E−73 | YCV2_YEAST | HYPOTHETICAL | 2.6 |
| | | SH3-containing | | | 13.8 KD PROTEIN | |
| | | protein SH3P7 | | | IN PWP2-SUP61 | |
| | | mRNA, complete | | | INTERGENIC | |
| | | cds. similar to | | | REGION | |
| | | Human Drebrin | | | | |
| 562 | AB007878 | Homo sapiens | e−110 | GLU2_MAIZE | GLUTELIN 2 | 0.72 |
| | | KIAA0418 | | | PRECURSOR (ZEIN- | |
| | | mRNA, complete | | | GAMMA) (27 KD | |
| | | cds | | | ZEIN) | |
| 563 | AF065482 | Homo sapiens | 0 | YJD6_YEAST | HYPOTHETICAL | 1.4 |
| | | sorting nexin 2 | | | 49.0 KD PROTEIN | |
| | | (SNX2) mRNA, | | | IN NSP1-KAR2 | |
| | | complete cds | | | INTERGENIC | |
| | | | | | REGION | |
| 564 | U27873 | Stealth virus 1 | 0.002 | SYN1_HUMAN | SYNAPSINS IA | 1.6 |
| | | clone 3B11 T7 | | | AND IB (BRAIN | |
| | | | | | PROTEIN 4.1) | |
| 565 | L38951 | Homo sapiens | 2.00E−68 | VP2_BRD | STRUCTURAL | 1.1 |
| | | importin beta | | | CORE PROTEIN | |
| | | subunit mRNA, | | | VP2 | |
| | | complete cds | | | | |
| 566 | AF007155 | Homo sapiens | e−165 | YOHI_AZOVI | HYPOTHETICAL | 7.5 |
| | | clone 23763 | | | 33.2 KD PROTEIN | |
| | | unknown mRNA, | | | IN IBPB 5′ REGION | |
| | | partial cds | | | | |
| 567 | Z56295 | H. sapiens CpG | 0.12 | A1AB_CANFA | ALPHA-1B | 0.85 |
| | | DNA, clone 10c2, | | | ADRENERGIC | |
| | | forward read | | | RECEPTOR | |
| | | cpg10c2.ft1a. | | | (FRAGMENT) | |
| 568 | Z83792 | G. gallus | 0.12 | <NONE> | <NONE> | <NONE> |
| | | microsatellite | | | | |
| | | DNA (LEI0222 | | | | |
| 569 | U11820 | Feline | 1.1 | <NONE> | <NONE> | <NONE> |
| | | immunodeficienc | | | | |
| | | y virus | | | | |
| | | USIL2489_7B | | | | |
| | | gag polyprotein | | | | |
| | | (gag) gene, | | | | |
| | | complete cds, | | | | |
| | | polymerase | | | | |
| | | polyprotein (pol) | | | | |
| | | gene, partial cds, | | | | |
| | | vif protein (vif), | | | | |
| | | complete cds, and | | | | |
| | | envelope | | | | |
| | | glycoprotein | | | | |
| | | (env), complete | | | | |
| | | cds, complete g... | | | | |
| 570 | M18065 | Mouse 18S and | 6.00E−04 | CC40_YEAST | CELL DIVISION | 3.7 |
| | | 28S ribosomal | | | CONTROL | |
| | | DNA, 5′ | | | PROTEIN 40 | |
| | | hypervariable | | | | |
| | | (Vr) region, clone | | | | |
| | | M1. | | | | |
| 571 | AF053645 | Homo sapiens | 2.00E−07 | YMQ4_CAEEL | HYPOTHETICAL | 4.3 |
| | | cellular apoptosis | | | 25.8 KD PROTEIN | |
| | | susceptibility | | | K02D10.4 IN | |
| | | protein (CSE1) | | | CHROMOSOME III | |
| | | gene, exons 3 | | | | |
| | | through 10 | | | | |
| 572 | X04588 | Human 2.5 kb | 0 | <NONE> | <NONE> | <NONE> |
| | | mRNA for | | | | |
| | | cytoskeletal | | | | |
| | | tropomyosin | | | | |
| | | TM30(nm) | | | | |
| 573 | AC001159 | Homo sapiens | 5.00E−04 | XYND_CELFI | ENDO-1,4-BETA- | 7.3 |
| | | (subclone 1_h9 | | | XYLANASED | |
| | | from PAC H92) | | | PRECURSOR (EC | |
| | | DNA sequence | | | 3.2.1.8) | |
| 574 | Z60625 | H. sapiens CpG | 4.00E−13 | <NONE> | <NONE> | <NONE> |
| | | DNA, clone 2c10, | | | | |
| | | forward read | | | | |
| | | cpg2c10.ft1aa. | | | | |
| 575 | AF070640 | Homo sapiens | e−164 | <NONE> | <NONE> | <NONE> |
| | | clone 24781 | | | | |
| | | mRNA sequence | | | | |
| 576 | Y11306 | Homo sapiens | 2.00E−48 | TCF1_HUMAN | T-CELL-SPECIFIC | 2.00E−15 |
| | | mRNA for hTCF-4 | | | TRANSCRIPTION | |
| | | | | | FACTOR 1 (TCF-1) | |
| 577 | X65279 | pWE15 cosmid | 7.00E−69 | OCLN_POTTR | Q28793 potorous | 0.71 |
| | | vector DNA | | | tridactylus (potoroo). | |
| | | | | | occludin. 11/98 | |
| 578 | M10296 | Mouse DNA with | 0.001 | LMB1_HYDAT | LAMININ BETA-1 | 1.9 |
| | | homology to EBV | | | CHAIN | |
| | | IR3 repeat, | | | PRECURSOR | |
| | | segment 1, clone | | | (FRAGMENTS) | |
| | | Mu2. | | | | |
| 579 | X53744 | Canine mRNA for | e−162 | SR68_CANFA | SIGNAL | 5.00E−16 |
| | | 68 kDA subunit of | | | RECOGNITION | |
| | | signal recognition | | | PARTICLE 68 KD | |
| | | particle (SRP68) | | | PROTEIN (SRP68) | |
| 580 | AF086438 | Homo sapiens full | 2.00E−04 | <NONE> | <NONE> | <NONE> |
| | | length insert | | | | |
| | | cDNA clone | | | | |
| | | ZD80G11 | | | | |
| 581 | U15140 | Mycobacterium | 1.3 | <NONE> | <NONE> | <NONE> |
| | | bovis ribosomal | | | | |
| | | proteins IF-1 | | | | |
| | | complete cds, and | | | | |
| | | S4 (rpsD) gene, | | | | |
| | | partial cds | | | | |
| 582 | D13292 | Human mRNA | e−166 | RSP4_ARATH | 40S RIBOSOMAL | 1.4 |
| | | for ryudocan core | | | PROTEIN SA (P40) | |
| | | protein | | | (LAMININ | |
| | | | | | RECEPTOR | |
| | | | | | HOMOLOG) | |
| 583 | S71022 | neoplasm-related | 9.00E−30 | RL6_HUMAN | 60S RIBOSOMAL | 5.6 |
| | | C140 product | | | PROTEIN L6 (TAX- | |
| | | [human, thyroid | | | RESPONSIVE | |
| | | carcinoma cells, | | | ENHANCER | |
| | | mRNA, 670 nt] | | | ELEMENT BINDING | |
| | | | | | PROTEIN 107) | |
| | | | | | (TAXREB 107) | |
| 584 | L20934 | Anopheles | 0.014 | <NONE> | <NONE> | <NONE> |
| | | gambiae complete | | | | |
| | | mitochondrial | | | | |
| | | genome | | | | |
| 585 | Z49269 | H. sapiens gene | 1.1 | AMY1_DICTH | ALPHA-AMYLASE | 2.5 |
| | | for chemokine | | | 1 (EC 3.2.1.1) (1,4- | |
| | | HCC-1. | | | ALPHA-D-GLUCAN | |
| | | | | | GLUCANOHYDROL | |
| | | | | | ASE) | |
| 586 | U95098 | Xenopus laevis | 2.00E−04 | <NONE> | <NONE> | <NONE> |
| | | mitotic | | | | |
| | | phosphoprotein | | | | |
| | | 44 mRNA, partial | | | | |
| | | cds | | | | |
| 587 | AF029893 | Homo sapiens i- | 0.13 | HEMO_PIG | HEMOPEXIN | 3.5 |
| | | beta-1,3-N- | | | PRECURSOR | |
| | | acetylglucosamin | | | (HYALURONIDASE | |
| | | yltransferase | | | ) (EC 3.2.1.35) | |
| | | mRNA, complete | | | | |
| | | cds | | | | |
| 588 | J05109 | T. thermophila | 0.014 | <NONE> | <NONE> | <NONE> |
| | | calcium-binding | | | | |
| | | 25 kDa (TCBP | | | | |
| | | 25) protein gene, | | | | |
| | | complete cds. | | | | |
| 589 | U95098 | Xenopus laevis | 6.00E−04 | <NONE> | <NONE> | <NONE> |
| | | mitotic | | | | |
| | | phosphoprotein | | | | |
| | | 44 mRNA, partial | | | | |
| | | cds | | | | |
| 590 | AF060246 | Mus musculus | 1.00E−83 | SCRB_PEDPE | SUCROSE−6- | 10 |
| | | strain C57BL/6 | | | PHOSPHATE | |
| | | zinc finger protein | | | HYDROLASE (EC | |
| | | 106 (Zfp 106) | | | 3.2.1.26) (SUCRASE) | |
| | | mRNA, H3a-a | | | | |
| | | allele, complete | | | | |
| | | cds | | | | |
| 591 | Y11966 | B. aphidicola (host | 0.37 | <NONE> | <NONE> | <NONE> |
| | | T. suberi) plasmid | | | | |
| | | pBTs1 genes | | | | |
| | | leuA, hspA, | | | | |
| | | repA2, repA1, | | | | |
| | | leuB, leuC, leuD, | | | | |
| | | leuA | | | | |
| 592 | U20428 | Human SNC19 | 1.00E−64 | YY22_MYCTU | HYPOTHETICAL | 0.29 |
| | | mRNA sequence | | | 30.8 KD PROTEIN | |
| | | | | | CY49.22 | |
| 593 | AF043084 | Lycopersicon | 0.37 | KNIR_DROME | ZYGOTIC GAP | 9.9 |
| | | esculentum | | | PROTEIN KNIRPS | |
| | | ethylene receptor | | | | |
| | | homolog (ETR1) | | | | |
| | | mRNA, complete | | | | |
| | | cds | | | | |
| 594 | X65279 | pWE15 cosmid | 5.00E−66 | COA1_SV40 | COAT PROTEIN | 0.001 |
| | | vector DNA | | | VP1 | |
| 595 | U95098 | Xenopus laevis | 0.041 | UL88_HSV7J | PROTEIN U59 | 5.8 |
| | | mitotic | | | | |
| | | phosphoprotein | | | | |
| | | 44 mRNA, partial | | | | |
| | | cds | | | | |
| 596 | M91452 | Sus scrofa | 3.2 | <NONE> | <NONE> | <NONE> |
| | | ryanodine | | | | |
| | | receptor (RYR1) | | | | |
| | | gene, complete | | | | |
| | | cds. | | | | |
| 597 | U77327 | Human Ki-1/57 | e−158 | GAT1_CHICK | ERYTHROID | 1.2 |
| | | intracellular | | | TRANSCRIPTION | |
| | | antigen mRNA, | | | FACTOR (GATA-1) | |
| | | partial cds | | | (ERYF1) | |
| 598 | U77327 | Human Ki-1/57 | 0 | RPB7_ARATH | DNA-DIRECTED | 6.2 |
| | | intracellular | | | RNA POLYMERASE | |
| | | antigen mRNA, | | | II 19 KD | |
| | | partial cds | | | POLYPEPTIDE (EC | |
| | | | | | 2.7.7.6) (RNA | |
| | | | | | POLYMERASE II | |
| | | | | | SUBUNIT 5) | |
| 599 | Y16964 | Saccharomyces | 0.37 | NMD5_YEAST | NONSENSE− | 1.9 |
| | | sp. mitochondrial | | | MEDIATED MRNA | |
| | | DNA for OLI1 | | | DECAY PROTEIN 5 | |
| | | gene, strain CID1 | | | | |
| 600 | U95102 | Xenopus laevis | 6.00E−06 | <NONE> | <NONE> | <NONE> |
| | | mitotic | | | | |
| | | phosphoprotein | | | | |
| | | 90 mRNA, | | | | |
| | | complete cds | | | | |
| 601 | U95098 | Xenopus laevis | 8.00E−08 | <NONE> | <NONE> | <NONE> |
| | | mitotic | | | | |
| | | phosphoprotein | | | | |
| | | 44 mRNA, partial | | | | |
| | | cds | | | | |
| 602 | AF091046 | Brugia pahangi | 1.1 | INVO_PONPY | INVOLUCRIN | 0.23 |
| | | nuclear hormone | | | | |
| | | receptor (bhr-1) | | | | |
| | | gene, partial cds | | | | |
| 603 | M87339 | Human | 0 | AC12_HUMAN | ACTIVATOR 1 37 | 1.00E−38 |
| | | replication factor | | | KD SUBUNIT | |
| | | C, 37-kDa subunit | | | (REPLICATION | |
| | | mRNA, complete | | | FACTOR C 37 KD | |
| | | cds | | | SUBUNIT) (A1 37 | |
| | | | | | KD SUBUNIT) (RF- | |
| | | | | | C 37 KD SUBUNIT) | |
| | | | | | (RFC37) | |
| 604 | D28116 | Human genes for | 0.39 | <NONE> | <NONE> | <NONE> |
| | | collagen type IV | | | | |
| | | alpha 5 and 6, | | | | |
| | | exon 1 and exon | | | | |
| | | 1′ | | | | |
| 605 | U95102 | Xenopus laevis | 2.00E−06 | <NONE> | <NONE> | <NONE> |
| | | mitotic | | | | |
| | | phosphoprotein | | | | |
| | | 90 mRNA, | | | | |
| | | complete cds | | | | |
| 606 | AE001149 | Borrelia | 0.13 | <NONE> | <NONE> | <NONE> |
| | | burgdorferi | | | | |
| | | (section 35 of 70) | | | | |
| | | of the complete | | | | |
| | | genome | | | | |
| 607 | X14168 | Human pLC46 | 6.00E−16 | Z136_HUMAN | ZINC FINGER | 0.31 |
| | | with DNA | | | PROTEIN 136 | |
| | | replication origin | | | | |
| 608 | Z57610 | H. sapiens CpG | 7.00E−90 | HN3B_RAT | HEPATOCYTE | 1.00E−19 |
| | | DNA, clone | | | NUCLEAR FACTOR | |
| | | 187a10, reverse | | | 3-BETA (HNF-3B) | |
| | | read | | | | |
| | | cpg187a10.rt1a. | | | | |
| 609 | U95098 | Xenopus laevis | 0.043 | PGCV_MOUSE | VERSICAN CORE | 3.5 |
| | | mitotic | | | PROTEIN | |
| | | phosphoprotein | | | PRECURSOR | |
| | | 44 mRNA, partial | | | (LARGE | |
| | | cds | | | FIBROBLAST | |
| | | | | | PROTEOGLYCAN) | |
| | | | | | (CHONDROITIN | |
| | | | | | SULFATE | |
| | | | | | PROTEOGLYCAN | |
| | | | | | CORE PROTEIN 2) | |
| | | | | | (PG-M) | |
| 610 | U95094 | Xenopus laevis | 7.00E−07 | CA11_CHICK | PROCOLLAGEN | 0.4 |
| | | XL-INCENP | | | ALPHA 1(I) CHAIN | |
| | | (XL-INCENP) | | | PRECURSOR | |
| | | mRNA, complete | | | | |
| | | cds | | | | |
| 611 | AB007956 | Homo sapiens | e−106 | RRPB_CVMA5 | RNA-DIRECTED | 9.7 |
| | | mRNA, | | | RNA POLYMERASE | |
| | | chromosome 1 | | | (EC 2.7.7.48) | |
| | | specific transcript | | | (ORF1B) | |
| | | KIAA0487 | | | | |
| 612 | U95102 | Xenopus laevis | 0.005 | <NONE> | <NONE> | <NONE> |
| | | mitotic | | | | |
| | | phosphoprotein | | | | |
| | | 90 mRNA, | | | | |
| | | complete cds | | | | |
| 613 | U95094 | Xenopus laevis | 6.00E−05 | UL52_EBV | HELICASE/PRIMAS | 5.9 |
| | | XL-INCENP | | | E COMPLEX | |
| | | (XL-INCENP) | | | PROTEIN | |
| | | mRNA, complete | | | (PROBABLE DNA | |
| | | cds | | | REPLICATION | |
| | | | | | PROTEIN BSLF1) | |
| 614 | U95760 | Drosophila | 3.00E−71 | POLG_PVYHU | GENOME | 4.3 |
| | | melanogaster | | | POLYPROTEIN | |
| | | strawberry notch | | | (CONTAINS: N- | |
| | | (sno) mRNA, | | | TERMINAL | |
| | | complete cds | | | PROTEIN; HELPER | |
| | | | | | COMPONENT | |
| | | | | | PROTEINASE (EC | |
| | | | | | 3.4.22.-) (HC-PRO); | |
| | | | | | 42- 50 KD PROTEIN; | |
| | | | | | CYTOPLASMIC | |
| | | | | | INCLUSION | |
| | | | | | PROTEIN (CI); 6 KD | |
| | | | | | PROTEIN; | |
| | | | | | NUCLEAR | |
| | | | | | INCLUSION | |
| | | | | | PROTEIN A (NI-A) | |
| | | | | | (EC 3.4.22.-) (49K | |
| | | | | | PROTEINASE) (49 | |
| 615 | U95102 | Xenopus laevis | 9.00E−09 | VP3_ROTPC | INNER CORE | 7.7 |
| | | mitotic | | | PROTEIN VP3 | |
| | | phosphoprotein | | | | |
| | | 90 mRNA, | | | | |
| | | complete cds | | | | |
| 616 | J05499 | Rattus norvegicus | e−143 | GLSL_RAT | GLUTAMINASE, | 7.00E−67 |
| | | L-glutamine | | | LIVER ISOFORM | |
| | | amidohydrolase | | | PRECURSOR (EC | |
| | | mRNA, complete | | | 3.5.1.2) (GLS) | |
| | | cds | | | | |
| 617 | M19262 | Rat clathrin light | 0.37 | Y642_METJA | HYPOTHETICAL | 5.8 |
| | | chain (LCB3) | | | PROTEIN MJ0642 | |
| | | mRNA, complete | | | | |
| | | cds. | | | | |
| 618 | M21191 | Human aldolase | 1.00E−32 | LIN1_NYCCO | LINE−1 REVERSE | 6.00E−17 |
| | | pseudogene | | | TRANSCRIPTASE | |
| | | mRNA, complete | | | HOMOLOG | |
| | | cds. | | | | |
| 619 | U95094 | Xenopus laevis | 1.00E−11 | NUCM_BOVIN | NADH- | 0.044 |
| | | XL-INCENP | | | UBIQUINONE | |
| | | (XL-INCENP) | | | OXIDOREDUCTASE | |
| | | mRNA, complete | | | 49KD SUBUNIT (EC | |
| | | cds | | | 1.6.5.3) (EC 1.6.99.3) | |
| | | | | | (COMPLEX I-49KD) | |
| | | | | | (CI-49KD) | |
| 620 | U95098 | Xenopus laevis | 0.005 | HEMZ_RHOCA | FERROCHELATASE | 4.4 |
| | | mitotic | | | (EC 4.99.1.1) | |
| | | phosphoprotein | | | (PROTOHEME | |
| | | 44 mRNA, partial | | | FERRO-LYASE) | |
| | | cds | | | | |
| 621 | AF041428 | Homo sapiens | 0.002 | <NONE> | <NONE> | <NONE> |
| | | ribosomal protein | | | | |
| | | s4 X isoform | | | | |
| | | gene, complete | | | | |
| | | cds | | | | |
| 622 | X07158 | Chironomus | 0.13 | <NONE> | <NONE> | <NONE> |
| | | thummi DNA for | | | | |
| | | Cla repetitive | | | | |
| | | element | | | | |
| 623 | U95094 | Xenopus laevis | 8.00E−04 | <NONE> | <NONE> | <NONE> |
| | | XL-INCENP | | | | |
| | | (XL-INCENP) | | | | |
| | | mRNA, complete | | | | |
| | | cds | | | | |
| 624 | AF100470 | Rattus norvegicus | 1.00E−53 | <NONE> | <NONE> | <NONE> |
| | | ribosome attached | | | | |
| | | membrane protein | | | | |
| | | 4 (RAMP4) | | | | |
| | | mRNA, complete | | | | |
| | | cds | | | | |
| 625 | U85193 | Human nuclear | 2.00E−38 | <NONE> | <NONE> | <NONE> |
| | | factor I-B2 | | | | |
| | | (NFIB2) mRNA, | | | | |
| | | complete cds | | | | |
| 626 | M13452 | Human lamin A | 6.00E−16 | <NONE> | <NONE> | <NONE> |
| | | mRNA, 3′ end. | | | | |
| 627 | U95094 | Xenopus laevis | 0.014 | ACDV_RAT | ACYL-COA | 4.00E−20 |
| | | XL-INCENP | | | DEHYDROGENASE, | |
| | | (XL-INCENP) | | | VERY-LONG- | |
| | | mRNA, complete | | | CHAIN SPECIFIC | |
| | | cds | | | PRECURSOR (EC | |
| | | | | | 1.3.99.-) (VLCAD) | |
| 628 | U95094 | Xenopus laevis | 3.00E−10 | <NONE> | <NONE> | <NONE> |
| | | XL-INCENP | | | | |
| | | (XL-INCENP) | | | | |
| | | mRNA, complete | | | | |
| | | cds | | | | |
| 629 | <NONE> | <NONE> | <NONE> | <NONE> | <NONE> | <NONE> |
| 630 | U95102 | Xenopus laevis | 2.00E−05 | <NONE> | <NONE> | <NONE> |
| | | mitotic | | | | |
| | | phosphoprotein | | | | |
| | | 90 mRNA, | | | | |
| | | complete cds | | | | |
| 631 | U95102 | Xenopus laevis | 6.00E−05 | <NONE> | <NONE> | <NONE> |
| | | mitotic | | | | |
| | | phosphoprotein | | | | |
| | | 90 mRNA, | | | | |
| | | complete cds | | | | |
| 632 | U95094 | Xenopus laevis | 6.00E−05 | YS83_CAEEL | HYPOTHETICAL | 0.65 |
| | | XL-INCENP | | | 86.9 KD PROTEIN | |
| | | (XL-INCENP) | | | ZK945.3 IN | |
| | | mRNA, complete | | | CHROMOSOME II | |
| | | cds | | | | |
| 633 | U95102 | Xenopus laevis | 3.00E−09 | NRP_MOUSE | NEUROPILIN | 2.7 |
| | | mitotic | | | PRECURSOR (A5 | |
| | | phosphoprotein | | | PROTEIN) | |
| | | 90 mRNA, | | | | |
| | | complete cds | | | | |
| 634 | U95098 | Xenopus laevis | 2.00E−05 | Y4JN_RHISN | HYPOTHETICAL | 5.9 |
| | | mitotic | | | 16.3 KD PROTEIN | |
| | | phosphoprotein | | | Y4JN | |
| | | 44 mRNA, partial | | | | |
| | | cds | | | | |
| 635 | U95102 | Xenopus laevis | 6.00E−05 | <NONE> | <NONE> | <NONE> |
| | | mitotic | | | | |
| | | phosphoprotein | | | | |
| | | 90 mRNA, | | | | |
| | | complete cds | | | | |
| 636 | X64707 | H. sapiens BBC1 | e−179 | RL13_HUMAN | 60S RIBOSOMAL | 5.00E−40 |
| | | mRNA | | | PROTEIN L13 | |
| | | | | | (BREAST BASIC | |
| | | | | | CONSERVED | |
| | | | | | PROTEIN 1) | |
| 637 | U95102 | Xenopus laevis | 3.00E−08 | <NONE> | <NONE> | <NONE> |
| | | mitotic | | | | |
| | | phosphoprotein | | | | |
| | | 90 mRNA, | | | | |
| | | complete cds | | | | |
| 638 | X14168 | Human pLC46 | 5.00E−14 | SP3_HUMAN | TRANSCRIPTION | 0.19 |
| | | with DNA | | | FACTOR SP3 (SPR- | |
| | | replication origin | | | 2) (FRAGMENT) | |
| 639 | X90999 | H. sapiens mRNA | 9.00E−20 | GLO2_HUMAN | HYDROXYACYLGL | 0.007 |
| | | for Glyoxalase II | | | UTATHIONE | |
| | | | | | HYDROLASE (EC | |
| | | | | | 3.1.2.6) | |
| 640 | AF083322 | Homo sapiens | 9.00E−51 | KIF4_MOUSE | KINESIN-LIKE | 0.005 |
| | | centriole | | | PROTEIN KIF4 | |
| | | associated protein | | | | |
| | | CEP110 mRNA, | | | | |
| | | complete cds | | | | |
| 641 | Z12002 | M. musculus Pvt-1 | 0.36 | CP5F_CANTR | CYTOCHROME | 5.6 |
| | | mRNA. | | | P450 LIIA6 | |
| | | | | | (ALKANE− | |
| | | | | | INDUCIBLE) (EC | |
| | | | | | 1.14.14.1) (P450- | |
| | | | | | ALK3) | |
| 642 | M10206 | R. sphaeroides | 1.1 | YGR1_YEAST | HYPOTHETICAL | 0.006 |
| | | reaction center L | | | 34.8 KD PROTEIN | |
| | | subunit (complete | | | IN SUT1-RCK1 | |
| | | cds) and M | | | INTERGENIC | |
| | | subunit (5′ end) | | | REGION | |
| | | genes. | | | | |
| 643 | K02668 | E. coli ddl gene | 3.3 | ANKB_HUMAN | ANKYRIN, BRAIN | 7.00E−07 |
| | | encoding D- | | | VARIANT 1 | |
| | | alanine:D-alanine | | | (ANKYRIN B) | |
| | | ligase and ftsQ | | | (ANKYRIN, | |
| | | and ftsA genes, | | | NONERYTHROID) | |
| | | complete cds, and | | | | |
| | | ftsZ gene, 5′ end. | | | | |
| 644 | <NONE> | <NONE> | <NONE> | <NONE> | <NONE> | <NONE> |
| 645 | X53616 | C. domesticus | 1.1 | <NONE> | <NONE> | <NONE> |
| | | calnexin (pp90) | | | | |
| | | mRNA | | | | |
| 646 | X57010 | Human COL2A1 | 3.3 | PRIO_PIG | MAJOR PRION | 1.9 |
| | | gene for collagen | | | PROTEIN | |
| | | II alpha 1 chain, | | | PRECURSOR (PRP) | |
| | | exons E2-E15 | | | | |
| 647 | U95097 | Xenopus laevis | 1.1 | UL07_HSV2H | PROTEIN UL7 | 7.3 |
| | | mitotic | | | | |
| | | phosphoprotein | | | | |
| | | 43 mRNA, partial | | | | |
| | | cds | | | | |
| 648 | X52956 | Human CAMII- | 0.37 | PRTP_EBV | PROBABLE | 7.5 |
| | | psi3 calmodulin | | | PROCESSING AND | |
| | | retropseudogene | | | TRANSPORT | |
| | | | | | PROTEIN | |
| 649 | M93425 | Human protein | 0 | PTNC_HUMAN | PROTEIN- | e−107 |
| | | tyrosine | | | TYROSINE | |
| | | phosphatase | | | PHOSPHATASE G1 | |
| | | (PTP-PEST) | | | (EC 3.1.3.48) | |
| | | mRNA, complete | | | (PTPG1) | |
| | | cds. | | | | |
| 650 | L47615 | Mus musculus | 0.13 | YA53_SCHPO | HYPOTHETICAL | 2.00E−07 |
| | | DNA-binding | | | 24.2 KD PROTEIN | |
| | | protein (Fli-1) | | | C13A11.03 IN | |
| | | gene, 5′ end of | | | CHROMOSOME I | |
| | | cds. | | | | |
| 651 | U60337 | Homo sapiens | 0 | GIL1_ENTHI | GALACTOSE− | 0.22 |
| | | beta-mannosidase | | | INHIBITABLE | |
| | | mRNA, complete | | | LECTIN 170 KD | |
| | | cds | | | SUBUNIT | |
| 652 | U08813 | Oryctolagus | 1.00E−22 | NAG1_HUMAN | SODIUM/GLUCOSE | 0.1 |
| | | cuniculus | | | COTRANSPORTER | |
| | | Na+/glucose | | | 1 (NA(+)/GLUCOSE | |
| | | cotransporter- | | | COTRANSPORTER | |
| | | related protein | | | 1) (HIGH AFFINITY | |
| | | mRNA, complete | | | SODIUM-GLUCOSE | |
| | | cds. | | | COTRANSPORTER) | |
| 653 | Y00282 | Human mRNA | 2.00E−78 | RIB2_HUMAN | DOLICHYL- | 5.00E−19 |
| | | for ribophorin II | | | DIPHOSPHOOLIGO | |
| | | | | | SACCHARIDE− | |
| | | | | | PROTEIN | |
| | | | | | GLYCOSYLTRANS | |
| | | | | | FERASE 63 KD | |
| | | | | | SUBUNIT | |
| | | | | | PRECURSOR (EC | |
| | | | | | 2.4.1.119) | |
| | | | | | (RIBOPHORIN II) | |
| 654 | D10051 | Human gene for | 0.014 | TAGB_DICDI | PRESTALK- | 7.6 |
| | | 92-kDa type IV | | | SPECIFIC PROTEIN | |
| | | collagenase, 5′ - | | | TAGB PRECURSOR | |
| | | flanking region | | | (EC 3.4.21.-) | |
| 655 | M29930 | Human insulin | 8.00E−08 | <NONE> | <NONE> | <NONE> |
| | | receptor (allele 2) | | | | |
| | | gene, exons 14, | | | | |
| | | 15, 16 and 17. | | | | |
| 656 | U78310 | Homo sapiens | 0 | YG2S_YEAST | HYPOTHETICAL | 0.002 |
| | | pescadillo | | | 69.9 KD PROTEIN | |
| | | mRNA, complete | | | IN MIC1-SRB5 | |
| | | cds | | | INTERGENIC | |
| | | | | | REGION | |
| 657 | X68792 | S. coelicolor | 3.2 | YBS0_YEAST | HYPOTHETICAL | 0.073 |
| | | A3(2) promoter | | | 27.0 KD PROTEIN | |
| | | sequence pth270 | | | IN VAL1-HSP26 | |
| | | | | | INTERGENIC | |
| | | | | | REGION | |
| 658 | U50535 | Human BRCA2 | 4.00E−12 | ALU1_HUMAN | !!!! ALU | 1.2 |
| | | region, mRNA | | | SUBFAMILY J | |
| | | sequence CG006 | | | WARNING ENTRY | |
| | | | | | !!!! | |
| 659 | U15522 | Sus scrofa clone | 3.2 | Z165_HUMAN | ZINC FINGER | 3.2 |
| | | pvg1a Ig heavy | | | PROTEIN 165 | |
| | | chain variable | | | | |
| | | VDJ region | | | | |
| | | mRNA, partial | | | | |
| | | cds. | | | | |
| 660 | M20918 | C. thummi piger | 0.12 | YT25_CAEEL | HYPOTHETICAL | 0.033 |
| | | haemoglobin (Hb) | | | 59.9 KD PROTEIN | |
| | | gene DNA, | | | B0304.5 IN | |
| | | complete cds. | | | CHROMOSOME II | |
| 661 | U60337 | Homo sapiens | 0 | <NONE> | <NONE> | <NONE> |
| | | beta-mannosidase | | | | |
| | | mRNA, complete | | | | |
| | | cds | | | | |
| 662 | U95098 | Xenopus laevis | 0.001 | ENV_MLVFP | ENV POLYPROTEIN | 3.3 |
| | | mitotic | | | PRECURSOR | |
| | | phosphoprotein | | | (CONTAINS: KNOB | |
| | | 44 mRNA, partial | | | PROTEIN GP70; | |
| | | cds | | | SPIKE PROTEIN | |
| | | | | | P15E; R PROTEIN) | |
| 663 | M97287 | Human | 0 | SAT1_HUMAN | DNA-BINDING | 2.00E−20 |
| | | MAR/SAR DNA | | | PROTEIN SATB1 | |
| | | binding protein | | | (SPECIAL AT-RICH | |
| | | (SATB1) mRNA, | | | SEQUENCE | |
| | | complete cds.>:: | | | BINDING PROTEIN | |
| | | gb\|I58691\|I58691 | | | 1) | |
| | | Sequence 1 from | | | | |
| | | patent US | | | | |
| | | 5652340 | | | | |
| 664 | L42612 | Homo sapiens | e−168 | K2C4_BOVIN | KERATIN, TYPE II | 4.00E−10 |
| | | keratin 6 isoform | | | CYTOSKELETAL 59 | |
| | | K6f (KRT6F) | | | KD, COMPONENT | |
| | | mRNA, complete | | | IV | |
| | | cds | | | | |
| 665 | U17901 | Rattus norvegicus | e−152 | PLAP_MOUSE | PHOSPHOLIPASE | 4.00E−13 |
| | | phospholipase A- | | | A-2-ACTIVATING | |
| | | 2-activating | | | PROTEIN (PLAP) | |
| | | protein (plap) | | | | |
| | | mRNA, complete | | | | |
| | | cds. | | | | |
| 666 | M73047 | Homo sapiens | 0 | MERT_STRLI | MERCURIC | 4.4 |
| | | tripeptidyl | | | TRANSPORT | |
| | | peptidase II | | | PROTEIN | |
| | | mRNA, complete | | | (MERCURY ION | |
| | | cds. | | | TRANSPORT | |
| | | | | | PROTEIN) | |
| 667 | U09954 | Human ribosomal | 0 | RL9_HUMAN | 60S RIBOSOMAL | 2.00E−11 |
| | | protein L9 gene, | | | PROTEIN L9 | |
| | | 5′ region and | | | | |
| | | complete cds. | | | | |
| 668 | X98330 | H. sapiens mRNA | 1.1 | HS74_MOUSE | HEAT SHOCK 70 | 0.034 |
| | | for ryanodine | | | KD PROTEIN AGP-2 | |
| | | receptor 2 | | | | |
| 669 | U95094 | Xenopus laevis | 0.002 | RPC2_DROME | DNA-DIRECTED | 1.1 |
| | | XL-INCENP | | | RNA POLYMERASE | |
| | | (XL-INCENP) | | | III 128 KD | |
| | | mRNA, complete | | | POLYPEPTIDE | |
| | | cds | | | | |
| 670 | AF069250 | Homo sapiens | 7.00E−80 | LEGB_PEA | LEGUMIN B | 0.011 |
| | | okadaic acid- | | | (FRAGMENT) | |
| | | inducible | | | | |
| | | phosphoprotein | | | | |
| | | (OA48-18) | | | | |
| | | mRNA, complete | | | | |
| | | cds | | | | |
| 671 | Z71419 | S. cerevisiae | 1.1 | FOCD_ECOLI | OUTER | 9.7 |
| | | chromosome XIV | | | MEMBRANE | |
| | | reading frame | | | USHER PROTEIN | |
| | | ORF YNL143c | | | FOCD PRECURSOR | |
| 672 | AF044965 | Homo sapiens | e−167 | PVR_MOUSE | POLIOVIRUS | 1.00E−12 |
| | | polio virus related | | | RECEPTOR | |
| | | protein 2 gene, | | | HOMOLOG | |
| | | alpha isoform, | | | PRECURSOR | |
| | | exon 6 and partial | | | | |
| | | cds | | | | |
| 673 | X65319 | Cloning vector | 2.00E−80 | S106_HUMAN | CALCYCLIN | 3.00E−15 |
| | | pCAT-Enhancer | | | (PROLACTIN | |
| | | | | | RECEPTOR | |
| | | | | | ASSOCIATED | |
| | | | | | PROTEIN) | |
| | | | | | CALCIUM- | |
| | | | | | BINDING PROTEIN | |
| | | | | | A6) | |
| 674 | D29655 | Pig mRNA for | e−103 | V319_ASFB7 | J319 PROTEIN | 4.3 |
| | | UMP-CMP | | | | |
| | | kinase, complete | | | | |
| | | cds | | | | |
| 675 | U95094 | Xenopus laevis | 8.00E−08 | VEGR_RAT | VASCULAR | 3.3 |
| | | XL-INCENP | | | ENDOTHELIAL | |
| | | (XL-INCENP) | | | GROWTH FACTOR | |
| | | mRNA, complete | | | RECEPTOR 1 | |
| | | cds | | | PRECURSOR | |
| | | | | | RECEPTOR FLT) | |
| | | | | | (FLT-1) | |
| 676 | D90217 | S. cerevisiae gene | 2.00E−07 | MALY_ECOLI | MALY PROTEIN | 5.6 |
| | | for YmL33, | | | (EC 2.6.1.-) | |
| | | mitochondrial | | | | |
| | | ribosomal | | | | |
| | | proteins of large | | | | |
| | | subunit | | | | |
| 677 | AF038952 | Homo sapiens | e−160 | T1CA_MOUSE | TCP1-CHAPERONIN | 4.00E−19 |
| | | cofactor A protein | | | COFACTOR A | |
| | | mRNA, complete | | | | |
| | | cds | | | | |
| 678 | Z96950 | Gorilla gorilla | 5.00E−14 | YHBZ_ECOLI | HYPOTHETICAL | 3.3 |
| | | DNA sequence | | | 43.3 KD GTP- | |
| | | orthologous to the | | | BINDING PROTEIN | |
| | | human Xp:Yp | | | IN DACB-RPMA | |
| | | telomere−junction | | | INTERGENIC | |
| | | region | | | REGION (F390) | |
| 679 | D50418 | Mouse mRNA for | 2.00E−79 | CYGX_RAT | OLFACTORY | 1.1 |
| | | AREC3, partial | | | GUANYLYL | |
| | | cds | | | CYCLASE GC-D | |
| | | | | | PRECURSOR (EC | |
| | | | | | 4.6.1.2) | |
| 680 | U95098 | Xenopus laevis | 8.00E−08 | P2C2_SCHPO | PROTEIN | 1.00E−04 |
| | | mitotic | | | PHOSPHATASE 2C | |
| | | phosphoprotein | | | HOMOLOG 2 (EC | |
| | | 44 mRNA, partial | | | 3.1.3.16) | |
| | | cds | | | | |
| 681 | AL010280 | Plasmodium | 0.12 | <NONE> | <NONE> | <NONE> |
| | | falciparum DNA | | | | |
| | | *** | | | | |
| | | SEQUENCING | | | | |
| | | IN PROGRESS | | | | |
| | | *** from contig | | | | |
| | | 4-106, complete | | | | |
| | | sequence | | | | |
| 682 | U95094 | Xenopus laevis | 5.00E−04 | VSM2_TRYBB | VARIANT | 4.3 |
| | | XL-INCENP | | | SURFACE | |
| | | (XL-INCENP) | | | GLYCOPROTEIN | |
| | | mRNA, complete | | | MITAT 1.2 | |
| | | cds | | | PRECURSOR (VSG | |
| | | | | | 221) | |
| 683 | U00238 | Homo sapiens | 0 | <NONE> | <NONE> | <NONE> |
| | | glutamine PRPP | | | | |
| | | amidotransferase | | | | |
| | | (GPAT) mRNA, | | | | |
| | | complete cds | | | | |
| 684 | U95102 | Xenopus laevis | 0.005 | PRPR_SALTY | PROPIONATE | 1.5 |
| | | mitotic | | | CATABOLISM | |
| | | phosphoprotein | | | OPERON | |
| | | 90 mRNA, | | | REGULATORY | |
| | | complete cds | | | PROTEIN | |
| 685 | U95102 | Xenopus laevis | 7.00E−07 | YAND_SCHPO | HYPOTHETICAL | 0.38 |
| | | mitotic | | | 30.4 KD PROTEIN | |
| | | phosphoprotein | | | C3H1.13 IN | |
| | | 90 mRNA, | | | CHROMOSOME I | |
| | | complete cds | | | | |
| 686 | D25538 | Human mRNA | 0 | <NONE> | <NONE> | <NONE> |
| | | for KIAA0037 | | | | |
| | | gene, complete | | | | |
| | | cds | | | | |
| 687 | U95102 | Xenopus laevis | 2.00E−07 | A1AA_RAT | ALPHA-1A | 4.4 |
| | | mitotic | | | ADRENERGIC | |
| | | phosphoprotein | | | RECEPTOR (RA42) | |
| | | 90 mRNA, | | | | |
| | | complete cds | | | | |
| 688 | L26956 | Mesocricetus | 4.00E−33 | <NONE> | <NONE> | <NONE> |
| | | auratus stearyl- | | | | |
| | | CoA desaturase | | | | |
| | | sequence | | | | |
| | | including male | | | | |
| | | hormone | | | | |
| | | dependent gene | | | | |
| | | derived from | | | | |
| | | hamster | | | | |
| | | frankorgan | | | | |
| 689 | U95102 | Xenopus laevis | 3.00E−10 | <NONE> | <NONE> | <NONE> |
| | | mitotic | | | | |
| | | phosphoprotein | | | | |
| | | 90 mRNA, | | | | |
| | | complete cds | | | | |
| 690 | U95102 | Xenopus laevis | 3.00E−09 | YO93_CAEEL | HYPOTHETICAL | 2.00E−08 |
| | | mitotic | | | 58.5 KD PROTEIN | |
| | | phosphoprotein | | | T20B12.3 IN | |
| | | 90 mRNA, | | | CHROMOSOME III | |
| | | complete cds | | | | |
| 691 | U95102 | Xenopus laevis | 8.00E−09 | <NONE> | <NONE> | <NONE> |
| | | mitotic | | | | |
| | | phosphoprotein | | | | |
| | | 90 mRNA, | | | | |
| | | complete cds | | | | |
| 692 | AB017026 | Mus musculus | 0 | OXYB_RABIT | OXYSTEROL- | 1.00E−34 |
| | | mRNA for | | | BINDING PROTEIN | |
| | | oxysterol-binding | | | | |
| | | protein, complete | | | | |
| | | cds | | | | |
| 693 | U95098 | Xenopus laevis | 6.00E−04 | UFO2_MAIZE | FLAVONOL 3-O- | 3.1 |
| | | mitotic | | | GLUCOSYLTRANS | |
| | | phosphoprotein | | | FERASE (EC | |
| | | 44 mRNA, partial | | | 2.4.1.91) | |
| | | cds | | | | |
| 694 | U95102 | Xenopus laevis | 5.00E−04 | <NONE> | <NONE> | <NONE> |
| | | mitotic | | | | |
| | | phosphoprotein | | | | |
| | | 90 mRNA, | | | | |
| | | complete cds | | | | |
| 695 | U34954 | Caenorhabditis | 5.00E−24 | CYPA_CAEEL | PEPTIDYL-PROLYL | 2.00E−29 |
| | | elegans | | | CIS-TRANS | |
| | | cyclophilin | | | ISOMERASE 10 (EC | |
| | | isoform 10 | | | 5.2.1.8) | |
| 696 | AB011167 | Homo sapiens | 0 | RFX5_HUMAN | BINDING | 2.1 |
| | | mRNA for | | | REGULATORY | |
| | | KIAA0595 | | | FACTOR | |
| | | protein, partial | | | | |
| | | cds | | | | |
| 697 | U03886 | Human GS2 | 2.00E−28 | SKD1_MOUSE | SKD1 PROTEIN | 4.00E−17 |
| | | mRNA, complete | | | | |
| | | cds. | | | | |
| 698 | AF086275 | Homo sapiens full | 3.00E−41 | SPT7_YEAST | TRANSCRIPTIONA | 0.82 |
| | | length insert | | | L ACTIVATOR SPT7 | |
| | | cDNA clone | | | | |
| | | ZD45C02 | | | | |
| 699 | U95102 | Xenopus laevis | 3.00E−10 | CA1E_HUMAN | COLLAGEN ALPHA | 1.1 |
| | | mitotic | | | 1(XV) CHAIN | |
| | | phosphoprotein | | | PRECURSOR | |
| | | 90 mRNA, | | | | |
| | | complete cds | | | | |
| 700 | U95102 | Xenopus laevis | 4.00E−11 | E434_ADECC | Q65962 canine | 4.4 |
| | | mitotic | | | adenovirus type 1 | |
| | | phosphoprotein | | | (strain cll). early e4 31 | |
| | | 90 mRNA, | | | kd protein. 11/98 | |
| | | complete cds | | | | |
| 701 | L17340 | Drosophila | 3.3 | CISY_TETTH | CITRATE | 9.7 |
| | | melanogaster | | | SYNTHASE, | |
| | | germline | | | MITOCHONDRIAL | |
| | | transcription | | | PRECURSOR (EC | |
| | | factor gene, | | | 4.1.3.7) (14 NM | |
| | | complete cds. | | | FILAMENT- | |
| | | | | | FORMING | |
| | | | | | PROTEIN) | |
| 702 | X58170 | M. musculus | 2.00E−45 | PME2_LYCES | PECTINESTERASE | 7.4 |
| | | mRNA for t- | | | 2 PRECURSOR (EC | |
| | | Complex Tcp-10a | | | 3.1.1.11) (PECTIN | |
| | | gene | | | METHYLESTERASE | |
| | | | | | ) (PE 2) | |
| 703 | Z96207 | H. sapiens | 8.00E−08 | <NONE> | <NONE> | <NONE> |
| | | telomeric DNA | | | | |
| | | sequence, clone | | | | |
| | | 12PTEL049, read | | | | |
| | | 12PTELOO049.seq | | | | |
| 704 | X58430 | Human Hox1.8 | e−146 | HXAA_HUMAN | HOMEOBOX | 4.00E−05 |
| | | gene | | | PROTEIN HOX-A10 | |
| | | | | | (HOX-1H) (HOX-1.8) | |
| | | | | | (PL) | |
| 705 | U95094 | Xenopus laevis | 6.00E−06 | YN39_SYNP7 | HYPOTHETICAL 9.2 | 0.89 |
| | | XL-INCENP | | | KD PROTEIN IN | |
| | | (XL-INCENP) | | | CYST-CYSR | |
| | | mRNA, complete | | | INTERGENIC | |
| | | cds | | | REGION (ORF 81) | |
| 706 | U95094 | Xenopus laevis | 1.00E−11 | MYSH_BOVIN | MYOSIN I HEAVY | 0.001 |
| | | XL-INCENP | | | CHAIN-LIKE | |
| | | (XL-INCENP) | | | PROTEIN (MIHC) | |
| | | mRNA, complete | | | (BRUSH BORDER | |
| | | cds | | | MYOSIN I) (BBMI) | |
| 707 | M19961 | Human | e−123 | OTHU5B | <NONE> | 3.00E−30 |
| | | cytochrome c | | | | |
| | | oxidase subunit | | | | |
| | | Vb (coxVb) | | | | |
| | | mRNA, complete | | | | |
| | | cds. | | | | |
| 708 | X68380 | M. musculus gene | 5.00E−04 | 42_MOUSE | ERYTHROCYTE | 9.9 |
| | | for cathepsin D, | | | MEMBRANE | |
| | | exon 3 | | | PROTEIN BAND 4.2 | |
| | | | | | (P4.2) (PALLIDIN) | |
| 709 | U95102 | Xenopus laevis | 1.00E−11 | TCPA_DROME | T-COMPLEX | 4.3 |
| | | mitotic | | | PROTEIN 1, ALPHA | |
| | | phosphoprotein | | | SUBUNIT (TCP-1- | |
| | | 90 mRNA, | | | ALPHA) | |
| | | complete cds | | | | |
| 710 | U95102 | Xenopus laevis | 3.00E−10 | <NONE> | <NONE> | <NONE> |
| | | mitotic | | | | |
| | | phosphoprotein | | | | |
| | | 90 mRNA, | | | | |
| | | complete cds | | | | |
| 711 | U95094 | Xenopus laevis | 4.00E−12 | <NONE> | <NONE> | <NONE> |
| | | XL-INCENP | | | | |
| | | (XL-INCENP) | | | | |
| | | mRNA, complete | | | | |
| | | cds | | | | |
| 712 | U95102 | Xenopus laevis | 0.002 | <NONE> | <NONE> | <NONE> |
| | | mitotic | | | | |
| | | phosphoprotein | | | | |
| | | 90 mRNA, | | | | |
| | | complete cds | | | | |
| 713 | AB018323 | Homo sapiens | 3.00E−41 | LBR_CHICK | LAMIN B | 3.4 |
| | | mRNA for | | | RECEPTOR | |
| | | KIAA0780 | | | | |
| | | protein, partial | | | | |
| | | cds | | | | |
| 714 | U95102 | Xenopus laevis | 6.00E−06 | YM8L_YEAST | HYPOTHETICAL | 3.00E−08 |
| | | mitotic | | | 71.1 KD PROTEIN | |
| | | phosphoprotein | | | IN DSK2-CAT8 | |
| | | 90 mRNA, | | | INTERGENIC | |
| | | complete cds | | | REGION | |
| 715 | U95102 | Xenopus laevis | 4.00E−13 | PSC_DROME | POSTERIOR SEX | 0.6 |
| | | mitotic | | | COMBS PROTEIN | |
| | | phosphoprotein | | | | |
| | | 90 mRNA, | | | | |
| | | complete cds | | | | |
| 716 | L28101 | Homo sapiens | 7.00E−07 | IRKX_RAT | INWARD | 5.4 |
| | | kallistatin (PI4) | | | RECTIFIER | |
| | | gene, exons 1-4, | | | POTASSIUM | |
| | | complete cds | | | CHANNEL BIR9 | |
| | | | | | (KIR5.1) | |
| 717 | AC001038 | Homo sapiens | 8.00E−09 | MGMT_YEAST | METHYLATED- | 0.48 |
| | | (subclone 2_h2 | | | DNA- PROTEIN- | |
| | | from P1 H49) | | | CYSTEINE | |
| | | DNA sequence | | | METHYLTRANSFE | |
| | | | | | RASE | |
| 718 | U95094 | Xenopus laevis | 1.00E−11 | YWDE_BACSU | HYPOTHETICAL | 1.8 |
| | | XL-INCENP | | | 19.9 KD PROTEIN | |
| | | (XL-INCENP) | | | IN SACA-UNG | |
| | | mRNA, complete | | | INTERGENIC | |
| | | cds | | | REGION | |
| | | | | | PRECURSOR | |
| 719 | U01139 | Mus musculus | e−110 | GSC_DROME | HOMEOBOX | 7.2 |
| | | B6D2F1 clone | | | PROTEIN | |
| | | 2C11B mRNA. | | | GOOSECOID | |
| 720 | AB017430 | Homo sapiens | 0 | YBAV_ECOLI | HYPOTHETICAL | 0.17 |
| | | mRNA for | | | 12.7 KD PROTEIN | |
| | | kinesin-like DNA | | | IN HUPB-COF | |
| | | binding protein, | | | INTERGENIC | |
| | | complete cds | | | REGION | |
| 721 | U95094 | Xenopus laevis | 0.001 | CPCF_SYNP2 | PHYCOCYANOBILI | 2.4 |
| | | XL-INCENP | | | N LYASE BETA | |
| | | (XL-INCENP) | | | SUBUNIT (EC 4.-.-.-) | |
| | | mRNA, complete | | | | |
| | | cds | | | | |
| 722 | U95102 | Xenopus laevis | 9.00E−10 | <NONE> | <NONE> | <NONE> |
| | | mitotic | | | | |
| | | phosphoprotein | | | | |
| | | 90 mRNA, | | | | |
| | | complete cds | | | | |
| 723 | U95102 | Xenopus laevis | 0.04 | YKK7_CAEEL | HYPOTHETICAL | 0.057 |
| | | mitotic | | | 54.9 KD PROTEIN | |
| | | phosphoprotein | | | C02F5.7 IN | |
| | | 90 mRNA, | | | CHROMOSOME III | |
| | | complete cds | | | | |
| 724 | U95094 | Xenopus laevis | 8.00E−08 | H5_CAIMO | HISTONE H5 | 0.39 |
| | | XL-INCENP | | | | |
| | | (XL-INCENP) | | | | |
| | | mRNA, complete | | | | |
| | | cds | | | | |
| 725 | U95094 | Xenopus laevis | 3.00E−09 | DED1_YEAST | PUTATIVE ATP- | 0.5 |
| | | XL-INCENP | | | DEPENDENT RNA | |
| | | (XL-INCENP) | | | HELICASE DED1 | |
| | | mRNA, complete | | | | |
| | | cds | | | | |
| 726 | J04617 | Human elongation | 5.00E−36 | ALU7_HUMAN | !!!ALU | 0.84 |
| | | factor EF-1-alpha | | | SUBFAMILY SQ | |
| | | gene, complete | | | WARNING ENTRY | |
| | | cds.>:: | | | !!! | |
| | | dbj\|E02629\|E0262 | | | | |
| | | 9 DNA of human | | | | |
| | | polypeptide chain | | | | |
| | | elongation factor- | | | | |
| | | 1 alpha | | | | |
| 727 | X54859 | Porcine TNF- | 3.3 | Z165_HUMAN | ZINC FINGER | 5.6 |
| | | alpha and TNF- | | | PROTEIN 165 | |
| | | beta genes for | | | | |
| | | tumour necrosis | | | | |
| | | factors alpha and | | | | |
| | | beta, respectively. | | | | |
| 728 | D49911 | Thermus | 0.014 | CC48_CAPAN | CELL DIVISION | 9.9 |
| | | thermophilus | | | CYCLE PROTEIN 48 | |
| | | UvrA gene, | | | HOMOLOG | |
| | | complete cds | | | | |
| 729 | U95098 | Xenopus laevis | 2.00E−06 | CA25_HUMAN | PROCOLLAGEN | 0.011 |
| | | mitotic | | | ALPHA 2(V) CHAIN | |
| | | phosphoprotein | | | PRECURSOR | |
| | | 44 mRNA, partial | | | | |
| | | cds | | | | |
| 730 | D15057 | Human mRNA | 0 | DAD1_HUMAN | DEFENDER | 8.00E−16 |
| | | for DAD-1, | | | AGAINST CELL | |
| | | complete cds | | | DEATH 1 (DAD-1) | |
| 731 | U95098 | Xenopus laevis | 6.00E−06 | ANFD_RHOCA | NITROGENASE | 9.6 |
| | | mitotic | | | IRON-IRON | |
| | | phosphoprotein | | | PROTEIN ALPHA | |
| | | 44 mRNA, partial | | | CHAIN (EC 1.18.6.1) | |
| | | cds | | | (NITROGENASE | |
| | | | | | COMPONENT I) | |
| | | | | | (DINITROGENASE) | |
| 732 | U95098 | Xenopus laevis | 7.00E−07 | EFTU_CHLVI | ELONGATION | 2.5 |
| | | mitotic | | | FACTOR TU (EF- | |
| | | phosphoprotein | | | TU) | |
| | | 44 mRNA, partial | | | | |
| | | cds | | | | |
| 733 | AB018335 | Homo sapiens | 0 | TRYM_RAT | MAST CELL | 5.6 |
| | | mRNA for | | | TRYPTASE | |
| | | KIAA0792 | | | PRECURSOR (EC | |
| | | protein, complete | | | 3.4.21.59) | |
| | | cds | | | | |
| 734 | X98743 | H. sapiens mRNA | 0.04 | <NONE> | <NONE> | <NONE> |
| | | for RNA helicase | | | | |
| | | (Myc-regulated | | | | |
| | | dead box protein) | | | | |
| 735 | U95098 | Xenopus laevis | 2.00E−07 | <NONE> | <NONE> | <NONE> |
| | | mitotic | | | | |
| | | phosphoprotein | | | | |
| | | 44 mRNA, partial | | | | |
| | | cds | | | | |
| 736 | Z49314 | S. cerevisiae | 3.2 | <NONE> | <NONE > | <NONE> |
| | | chromosome X | | | | |
| | | reading frame | | | | |
| | | ORF YJL039c | | | | |
| 737 | D12646 | Mouse kif4 | 0 | KIF4_MOUSE | KINESIN-LIKE | 2.00E−76 |
| | | mRNA for | | | PROTEIN KIF4 | |
| | | microtubule− | | | | |
| | | based motor | | | | |
| | | protein KIF4, | | | | |
| | | complete cds | | | | |
| 738 | J04038 | Human | 2.00E−47 | SDC1_HUMAN | SYNDECAN-1 | 3.5 |
| | | glyceraldehyde−3- | | | PRECURSOR | |
| | | phosphate | | | (SYND1) (CD138) | |
| | | dehydrogenase | | | | |
| 739 | AF010238 | Homo sapiens | 1.00E−09 | LIN1_HUMAN | LINE−1 REVERSE | 0.001 |
| | | von Hippel- | | | TRANSCRIPTASE | |
| | | Lindau tumor | | | HOMOLOG | |
| | | suppressor | | | | |
| 740 | U95102 | Xenopus laevis | 2.00E−06 | YQJX_BACSU | HYPOTHETICAL | 9.9 |
| | | mitotic | | | 13.2 KD PROTEIN | |
| | | phosphoprotein | | | IN GLNQ-ANSR | |
| | | 90 mRNA, | | | INTERGENIC | |
| | | complete cds | | | REGION | |
| 741 | L21186 | Human lysyl | e−145 | OXRTL | <NONE> | 1.00E−34 |
| | | oxidase−like | | | | |
| | | protein mRNA, | | | | |
| | | complete cds. | | | | |
| 742 | U95094 | Xenopus laevis | 2.00E−05 | CC48_SOYBN | CELL DIVISION | 7.6 |
| | | XL-INCENP | | | CYCLE PROTEIN 48 | |
| | | (XL-INCENP) | | | HOMOLOG | |
| | | mRNA, complete | | | (VALOSIN | |
| | | cds | | | CONTAINING | |
| | | | | | PROTEIN | |
| | | | | | HOMOLOG) (VCP) | |
| 743 | AF009203 | Homo sapiens | 3.3 | <NONE> | <NONE> | <NONE> |
| | | YAC clone | | | | |
| | | 377A1 unknown | | | | |
| | | mRNA, | | | | |
| | | 3′ untranslated | | | | |
| | | region | | | | |
| 744 | Z74894 | S. cerevisiae | 0.12 | CD14_RABIT | Q28680 oryctolagus | 1.9 |
| | | chromosome XV | | | cuniculus (rabbit). | |
| | | reading frame | | | monocyte | |
| | | ORF YOL152w | | | differentiation antigen | |
| | | | | | cd14 precursor. 11/98 | |
| 745 | U95094 | Xenopus laevis | 9.00E−10 | KIN3_YEAST | SERINE/THREONIN | 2.5 |
| | | XL-INCENP | | | E−PROTEIN KINASE | |
| | | (XL-INCENP) | | | KIN3 (EC 2.7.1.-) | |
| | | mRNA, complete | | | | |
| | | cds | | | | |
| 746 | U95102 | Xenopus laevis | 2.00E−05 | YA53_SCHPO | HYPOTHETICAL | 7.00E−17 |
| | | mitotic | | | 24.2 KD PROTEIN | |
| | | phosphoprotein | | | C13A11.03 IN | |
| | | 90 mRNA, | | | CHROMOSOME I | |
| | | complete cds | | | | |
| 747 | S61044 | ALDH3'2 aldehyd | 0 | DHAP_HUMAN | ALDEHYDE | 2.00E−71 |
| | | e dehydrogenase | | | DEHYDROGENASE, | |
| | | isozyme 3 | | | DIMERIC NADP- | |
| | | [human, stomach, | | | PREFERRING (EC | |
| | | mRNA Partial, | | | 1.2.1.5) (CLASS 3) | |
| | | 1362 nt] | | | | |
| 748 | U95094 | Xenopus laevis | 2.00E−08 | CA1E_CHICK | COLLAGEN ALPHA | 0.36 |
| | | XL-INCENP | | | 1(XIV) CHAIN | |
| | | (XL-INCENP) | | | PRECURSOR | |
| | | mRNA, complete | | | (UNDULIN) | |
| | | cds | | | | |
| 749 | U95102 | Xenopus laevis | 7.00E−06 | <NONE> | <NONE> | <NONE> |
| | | mitotic | | | | |
| | | phosphoprotein | | | | |
| | | 90 mRNA, | | | | |
| | | complete cds | | | | |
| 750 | L14815 | Entamoeba | 0.12 | <NONE> | <NONE> | <NONE> |
| | | histolytica HM- | | | | |
| | | 1:IMSS galactose− | | | | |
| | | specific adhesin | | | | |
| | | 170 kD subunit | | | | |
| | | (hg13) gene, | | | | |
| | | complete cds. | | | | |
| 751 | X63785 | T. thermophila | 1.1 | <NONE> | <NONE> | <NONE> |
| | | gene for snRNA | | | | |
| | | U2-2 | | | | |
| 752 | M83756 | Mytilus edulis | 0.042 | DSC1_HUMAN | DESMOCOLLIN | 2.6 |
| | | mitochondrial | | | 1A/1B PRECURSOR | |
| | | NADH | | | (DESMOSOMAL | |
| | | dehydrogenase | | | GLYCOPROTEIN | |
| | | subunit 5 (ND5) | | | 2/3) (DG2 / DG3) | |
| | | gene, 3′ end; | | | | |
| | | NADH | | | | |
| | | dehydrogenase | | | | |
| | | subunit 6 (ND6) | | | | |
| | | gene, complete | | | | |
| | | cds; and | | | | |
| | | cytochrome b (cyt | | | | |
| | | b), 5′ end. | | | | |
| 753 | AB001066 | Brown trout | 0.38 | IMB3_HUMAN | IMPORTIN BETA-3 | 1.2 |
| | | microsatellite | | | SUBUNIT | |
| | | DNA sequence | | | (KARYOPHERIN | |
| | | | | | BETA-3 SUBUNIT) | |
| 754 | AF064787 | Lotus japonicus | 0.51 | <NONE> | <NONE> | <NONE> |
| | | rac GTPase | | | | |
| | | activating protein | | | | |
| | | 1 mRNA, | | | | |
| | | complete cds | | | | |
| 755 | U20608 | Dictyostelium | 0.043 | <NONE> | <NONE> | <NONE> |
| | | discoideum | | | | |
| | | unknown spore | | | | |
| | | germination- | | | | |
| | | specific protein- | | | | |
| | | like protein, orf1, | | | | |
| | | orf2 and orf3 | | | | |
| | | genes, complete | | | | |
| | | cds | | | | |
| 756 | M77812 | Rabbit myosin | 1.2 | RBL1_HUMAN | RETINOBLASTOM | 4.9 |
| | | heavy chain | | | A-LIKE PROTEIN 1 | |
| | | mRNA, complete | | | (107 KD | |
| | | cds. | | | RETINOBLASTOM | |
| | | | | | A-ASSOCIATED | |
| | | | | | PROTEIN) (PRB1) | |
| | | | | | (P107) | |
| 757 | X63789 | T. thermophila | 0.058 | <NONE> | <NONE> | <NONE> |
| | | genes for snRNA | | | | |
| | | U5-1, snRNA U5- | | | | |
| | | 2 | | | | |
| 758 | D50646 | Mouse mRNA for | 2.00E−27 | PMT3_YEAST | DOLICHYL- | 0.002 |
| | | SDF2, complete | | | PHOSPHATE- | |
| | | cds | | | MANNOSE− | |
| | | | | | PROTEIN | |
| | | | | | MANNOSYLTRANS | |
| | | | | | FERASE 3 (EC | |
| | | | | | 2.4.1.109) | |
| 759 | L81583 | Homo sapiens | 3.00E−19 | ALU5_HUMAN | !!!! ALU | 0.86 |
| | | (subclone 3_g2 | | | SUBFAMILY SC | |
| | | from P1 H11) | | | WARNING ENTRY | |
| | | DNA sequence | | | !!!! | |
| 760 | U95102 | Xenopus laevis | 2.00E−06 | SYFA_YEAST | PHENYLALANYL- | 5.7 |
| | | mitotic | | | TRNA | |
| | | phosphoprotein | | | SYNTHETASE | |
| | | 90 mRNA, | | | ALPHA CHAIN | |
| | | complete cds | | | CYTOPLASMIC | |
| 761 | AF000370 | Homo sapiens | 6.00E−89 | APP1_MOUSE | AMYLOID-LIKE | 5.7 |
| | | polymorphic CA | | | PROTEIN 1 | |
| | | dinucleotide | | | PRECURSOR | |
| | | repeat flanking | | | (APLP) | |
| | | region | | | | |
| 762 | U95098 | Xenopus laevis | 0.002 | <NONE> | <NONE> | <NONE> |
| | | mitotic | | | | |
| | | phosphoprotein | | | | |
| | | 44 mRNA, partial | | | | |
| | | cds | | | | |
| 763 | U95102 | Xenopus laevis | 7.00E−06 | PSF_HUMAN | PTB-ASSOCIATED | 0.72 |
| | | mitotic | | | SPLICING FACTOR | |
| | | phosphoprotein | | | (PSF) | |
| | | 90 mRNA, | | | | |
| | | complete cds | | | | |
| 764 | AB018288 | Homo sapiens | 0 | TC2A_CAEBR | TRANSPOSABLE | 1.5 |
| | | mRNA for | | | ELEMENT TCB2 | |
| | | KIAA0745 | | | TRANSPOSASE | |
| | | protein, partial | | | | |
| | | cds | | | | |
| 765 | AF020282 | Dictyostelium | 0.38 | PMT2_YEAST | DOLICHYL- | 0.18 |
| | | discoideum | | | PHOSPHATE− | |
| | | DG2033 gene, | | | MANNOSE− | |
| | | partial cds | | | PROTEIN | |
| | | | | | MANNOSYLTRANS | |
| | | | | | FERASE 2 (EC | |
| | | | | | 2.4.1.109) | |
| 766 | AF017357 | Oryza sativa low | 0.38 | RGS3_HUMAN | REGULATOR OF G- | 0.23 |
| | | molecular early | | | PROTEIN | |
| | | light-inducible | | | SIGNALLING 3 | |
| | | protein mRNA, | | | (RGS3) (RGP3) | |
| | | complete cds | | | | |
| 767 | U67599 | Methanococcus | 0.13 | <NONE> | <NONE> | <NONE> |
| | | jannaschii section | | | | |
| | | 141 of 150 of the | | | | |
| | | complete genome | | | | |
| 768 | X74178 | B. taurus | 0.13 | FAG1_SYNY3 | P73574 synechocystis | 5.00E−16 |
| | | microsatellite | | | sp. (strain pcc 6803). | |
| | | DNA INRA153 | | | 3-oxoacyl-[acyl- | |
| | | | | | carrier protein] | |
| | | | | | reductase 1 (ec | |
| | | | | | 1.1.1.100) (3- | |
| | | | | | ketoacyl-acyl carrier | |
| | | | | | protein reductase 1). | |
| | | | | | 11/98 | |
| 769 | AF041858 | Mus musculus | 0.043 | CA44_HUMAN | COLLAGEN ALPHA | 0.24 |
| | | synaptojanin 2 | | | 4(IV) CHAIN | |
| | | isoform delta | | | PRECURSOR | |
| | | mRNA, partial | | | | |
| | | cds | | | | |
| 770 | J01404 | Drosophila | 0.021 | NU1M_CITLA | NADH- | 7.2 |
| | | melanogaster | | | UBIQUINONE | |
| | | mitochondrial | | | OXIDOREDUCTASE | |
| | | cytochrome c | | | CHAIN 1 (EC 1.6.5.3) | |
| | | oxidase subunits, | | | | |
| | | ATPase6, 7 | | | | |
| | | tRNAs (Trp, Cys, | | | | |
| | | Tyr, Leu(UUR), | | | | |
| | | Lys, Asp, Gly) | | | | |
| | | genes, and | | | | |
| | | unidentified | | | | |
| | | reading frames | | | | |
| | | A61, 2 and 3. | | | | |
| 771 | AL022317 | Human DNA | 3.00E−41 | ALU7_HUMAN | !!!! ALU | 4.00E−08 |
| | | sequence from | | | SUBFAMILY SQ | |
| | | clone 140L1 on | | | WARNING ENTRY | |
| | | chromosome | | | !!!! | |
| | | 22q13.1-13.31, | | | | |
| | | complete | | | | |
| | | sequence [Homo | | | | |
| | | sapiens ] | | | | |
| 772 | U95094 | Xenopus laevis | 1.00E−09 | <NONE> | <NONE> | <NONE> |
| | | XL-INCENP | | | | |
| | | (XL-INCENP) | | | | |
| | | mRNA, complete | | | | |
| | | cds | | | | |
| 773 | AF095927 | Rattus norvegicus | 0 | P2C_PARTE | PROTEIN | 1.00E−16 |
| | | protein | | | PHOSPHATASE 2C | |
| | | phosphatase 2C | | | (EC 3.1.3.16) (PP2C) | |
| | | mRNA, complete | | | | |
| | | cds | | | | |
| 774 | X87212 | H. sapiens mRNA | 0 | CATC_HUMAN | DIPEPTIDYL- | 2.00E−46 |
| | | for cathepsin C | | | PEPTIDASE I | |
| | | | | | PRECURSOR (EC | |
| | | | | | 3.4.14.1) | |
| 775 | X05283 | Drosophila | 4.5 | <NONE> | <NONE> | <NONE> |
| | | melanogaster | | | | |
| | | PKCG7 gene | | | | |
| | | exons 7-14 for | | | | |
| | | protein kinase C | | | | |
| 776 | X03558 | Human mRNA | 0 | EF11_HUMAN | ELONGATION | 1.00E−83 |
| | | for elongation | | | FACTOR 1-ALPHA 1 | |
| | | factor 1 alpha | | | (EF-1-ALPHA-1) | |
| | | subunit | | | | |
| 777 | X06960 | Aspergillus | 0.23 | <NONE> | <NONE> | <NONE> |
| | | nidulans | | | | |
| | | mitochondrial | | | | |
| | | DNA for | | | | |
| | | cytochrome | | | | |
| | | oxidase subunit 3, | | | | |
| | | tRNA-Tyr | | | | |
| 778 | U95102 | Xenopus laevis | 3.00E−09 | YMT8_YEAST | HYPOTHETICAL | 5.00E−07 |
| | | mitotic | | | 36.4 KD PROTEIN | |
| | | phosphoprotein | | | IN NUP116-FAR3 | |
| | | 90 mRNA, | | | INTERGENIC | |
| | | complete cds | | | REGION | |
| 779 | U95102 | Xenopus laevis | 2.00E−07 | NAT1_YEAST | N-TERMINAL | 5.00E−23 |
| | | mitotic | | | ACETYLTRANSFER | |
| | | phosphoprotein | | | ASE 1 (EC 2.3.1.88) | |
| | | 90 mRNA, | | | | |
| | | complete cds | | | | |
| 780 | U59706 | Gallus gallus | 0.014 | PPOL_SARPE | POLY (ADP- | 0.021 |
| | | alternatively | | | RIBOSE) | |
| | | spliced AMPA | | | POLYMERASE (EC | |
| | | glutamate | | | 2.4.2.30) (PARP) | |
| | | receptor, isoform | | | | |
| | | GluR2 flop, | | | | |
| | | (GluR2) mRNA, | | | | |
| | | partial cds. | | | | |
| 781 | U57391 | Rattus norvegicus | 1.00E−84 | <NONE> | <NONE> | <NONE> |
| | | FceRI gamma- | | | | |
| | | chain interacting | | | | |
| | | protein SH2-B | | | | |
| | | (SH2-B) mRNA, | | | | |
| | | complete cds | | | | |
| 782 | AB014591 | Homo sapiens | 7.00E−57 | SSGP_VOLCA | SULFATED | 5.3 |
| | | mRNA for | | | SURFACE | |
| | | KIAA0691 | | | GLYCOPROTEIN | |
| | | protein, complete | | | 185 (SSG 185) | |
| | | cds | | | | |
| 783 | AJ008065 | Chrysolina bankii | 0.043 | <NONE> | <NONE> | <NONE> |
| | | 16S rRNA gene, | | | | |
| | | mitotype B2 | | | | |
| 784 | AF067212 | Caenorhabditis | 0.005 | MEK1_RAT | MAPK/ERK KINASE | 4.5 |
| | | elegans cosmid | | | KINASE 1 (EC 2.7.1.- | |
| | | F37F2 | | | ) (MEK KINASE 1) | |
| 785 | U95094 | Xenopus laevis | 0.042 | <NONE> | <NONE> | <NONE> |
| | | XL-INCENP | | | | |
| | | (XL-INCENP) | | | | |
| | | mRNA, complete | | | | |
| | | cds | | | | |
| 786 | U95102 | Xenopus laevis | 9.00E−09 | <NONE> | <NONE> | <NONE> |
| | | mitotic | | | | |
| | | phosphoprotein | | | | |
| | | 90 mRNA, | | | | |
| | | complete cds | | | | |
| 787 | Y13401 | Homo sapiens | 8.00E−08 | <NONE> | <NONE> | <NONE> |
| | | CD3 delta gene, | | | | |
| | | enhancer | | | | |
| | | sequence | | | | |
| 788 | AE001038 | Archaeoglobus | 0.13 | <NONE> | <NONE> | <NONE> |
| | | fulgidus section | | | | |
| | | 69 of 172 of the | | | | |
| | | complete genome | | | | |
| 789 | U95102 | Xenopus laevis | 2.00E−06 | <NONE> | <NONE> | <NONE> |
| | | mitotic | | | | |
| | | phosphoprotein | | | | |
| | | 90 mRNA, | | | | |
| | | complete cds | | | | |
| 790 | AF041463 | Manihot esculenta | 1.4 | <NONE> | <NONE> | <NONE> |
| | | elongation factor | | | | |
| | | 1-alpha | | | | |
| 791 | U95102 | Xenopus laevis | 0.002 | HXA3_HAEIN | HEME:HEMOPEXIN | 2.7 |
| | | mitotic | | | -BINDING PROTEIN | |
| | | phosphoprotein | | | PRECURSOR | |
| | | 90 mRNA, | | | | |
| | | complete cds | | | | |
| 792 | Z12112 | pWE15A cosmid | 3.00E−29 | PKWA_THECU | PUTATIVE | 2.00E−04 |
| | | vector DNA | | | SERINE/THREONIN | |
| | | | | | E−PROTEIN KINASE | |
| | | | | | PKWA (EC 2.7.1.-) | |
| 793 | U85193 | Human nuclear | 4.00E−44 | <NONE> | <NONE> | <NONE> |
| | | factor I-B2 | | | | |
| | | (NFIB2) mRNA, | | | | |
| | | complete cds | | | | |
| 794 | U89331 | Human | 7.00E−06 | NRL_HUMAN | NEURAL RETINA- | 6.3 |
| | | pseudoautosomal | | | SPECIFIC LEUCINE | |
| | | homeodomain- | | | ZIPPER PROTEIN | |
| | | containing protein | | | (NRL) | |
| | | (PHOG) mRNA, | | | | |
| | | complete cds | | | | |
| 795 | AF055666 | Mus musculus | 0.52 | PSPD_BOVIN | PULMONARY | 0.33 |
| | | kinesin light chain | | | SURFACTANT- | |
| | | 2 (Klc2) mRNA, | | | ASSOCIATED | |
| | | complete cds | | | PROTEIN D | |
| | | | | | PRECURSOR | |
| 796 | L13321 | Homo sapiens | 0.14 | YRP2_YEAST | HYPOTHETICAL | 0.27 |
| | | iduronate−2- | | | 84.4 KD PROTEIN | |
| | | sulfatase (IDS) | | | IN RPC2/RET1 | |
| | | gene, exon 1, | | | 3′ REGION | |
| | | incomplete 5′ end. | | | | |
| 797 | AL010270 | Plasmodium | 0.37 | YTH3_CAEEL | HYPOTHETICAL | 2 |
| | | falciparum DNA | | | 75.5 KD PROTEIN | |
| | | *** | | | C14A4.3 IN | |
| | | SEQUENCING | | | CHROMOSOME II | |
| | | IN PROGRESS | | | | |
| | | *** from contig | | | | |
| | | 4-96, complete | | | | |
| | | sequence | | | | |
| 798 | U95098 | Xenopus laevis | 0.015 | IMB3_HUMAN | IMPORTIN BETA-3 | 0.063 |
| | | mitotic | | | SUBUNIT | |
| | | phosphoprotein | | | (KARYOPHERIN | |
| | | 44 mRNA, partial | | | BETA-3 SUBUNIT) | |
| | | cds | | | | |
| 799 | U70139 | Mus musculus | 0 | CCR4_YEAST | GLUCOSE− | 5.00E−11 |
| | | putative CCR4 | | | REPRESSIBLE | |
| | | protein mRNA, | | | ALCOHOL | |
| | | partial cds | | | DEHYDROGENASE | |
| | | | | | TRANSCRIPTIONA | |
| | | | | | L EFFECTOR | |
| | | | | | (CARBON | |
| | | | | | CATABOLITE | |
| | | | | | REPRESSOR | |
| | | | | | PROTEIN 4) | |
| 800 | L26507 | Mouse myocyte | 3.00E−41 | MNF_MOUSE | MYOCYTE | 4.00E−18 |
| | | nuclear factor | | | NUCLEAR FACTOR | |
| | | (MNF) mRNA, | | | (MNF) | |
| | | complete cds. | | | | |
| 801 | U20527 | Mus musculus | 0 | GRO_MOUSE | GROWTH REGULATED | 1.00E−28 |
| | | chemokine KC | | | PROTEIN PRECURSOR | |
| | | gene, 5′ region. | | | (PLATELET-DERIVED | |
| | | | | | GROWTH FACTOR- | |
| | | | | | INDUCIBLE PROTEIN | |
| | | | | | KC) (SECRETORY | |
| | | | | | PROTEIN N51) | |
| 802 | AF065482 | Homo sapiens | 0 | MYSA_DROME | MYOSIN HEAVY | 0.089 |
| | | sorting nexin 2 | | | CHAIN, MUSCLE | |
| | | (SNX2) mRNA, | | | | |
| | | complete cds | | | | |
| 803 | U05823 | Mus musculus | 1.00E−94 | M84D_DROME | MALE SPECIFIC SPERM | 0.099 |
| | | pericentrin mRNA, | | | PROTEIN MST84DD | |
| | | complete cds. | | | | |
| 804 | U67468 | Methanococcus | 0.4 | <NONE> | <NONE> | <NONE> |
| | | jannaschii section | | | | |
| | | 10 of 150 of the | | | | |
| | | complete genome | | | | |
| 805 | U14178 | Human type II IL-1 | 1.00E−19 | AMPH_HUMAN | AMPHIPHYSIN | 2.9 |
| | | receptor gene, exon | | | | |
| | | 1B | | | | |
| 806 | L40411 | Homo sapiens | 0 | TRI8_HUMAN | THYROID RECEPTOR | 4.00E−86 |
| | | thyroid receptor | | | INTERACTING PROTEIN | |
| | | interactor | | | 8 (TRIP8) | |
| 807 | D17218 | Human HepG2 3′ | e−136 | CA1A_HUMAN | COLLAGEN ALPHA 1(X) | 3.00E−04 |
| | | region MboI cDNA, | | | CHAIN PRECURSOR | |
| | | clone hmd3g02m3 | | | | |
| 808 | Z57610 | H. sapiens CpG | e−102 | HN3B_MOUSE | HEPATOCYTE | 1.00E−24 |
| | | DNA, clone 187a10, | | | NUCLEAR FACTOR 3- | |
| | | reverse read | | | BETA (HNF-3B) | |
| | | cpg187a10.rt1a. | | | | |
| 809 | D14678 | Human mRNA for | 0 | NCD_DROME | CLARET | 1.00E−70 |
| | | kinesin-related | | | SEGREGATIONAL | |
| | | protein, partial cds | | | PROTEIN | |
| 810 | X56317 | Xiphophorus | 0.49 | WN1B_MOUSE | WNT-10B PROTEIN | 7.2 |
| | | maculatus | | | PRECURSOR (WNT-12) | |
| | | Xmrk(proto- | | | | |
| | | oncogene) gene for | | | | |
| | | receptor tyrosine | | | | |
| | | kinase. | | | | |
| 811 | M36200 | Human | 0.2 | VE2_HPV14 | REGULATORY PROTEIN | 3.1 |
| | | synaptobrevin 1 | | | E2 | |
| | | (SYB1) gene, exon | | | | |
| | | 5. | | | | |
| 812 | M18157 | Human glandular | 1.5 | EKLF_MOUSE | ERYTHROID | 1.1 |
| | | kallikrein gene, | | | KRUEPPEL-LIKE | |
| | | complete cds. | | | TRANSCRIPTION | |
| | | | | | FACTOR (EKLF) | |
| 813 | D25215 | Human mRNA for | 1.9 | YXIS_SACER | HYPOTHETICAL 28.9 | 1.3 |
| | | KIAA0032 gene, | | | KD PROTEIN IN XIS | |
| | | complete cds | | | 5′ REGION (ORF1) | |
| 814 | M96628 | Human gene | 2.00E−06 | AGRI_DISOM | AGRIN (FRAGMENT) | 9.5 |
| | | sequence, 5′ end. | | | | |
| 815 | Z57610 | H. sapiens CpG | e−102 | HN3B_MOUSE | HEPATOCYTE | 1.00E−19 |
| | | DNA, clone 187a10, | | | NUCLEAR FACTOR 3- | |
| | | reverse read | | | BETA (HNF-3B) | |
| | | cpg187a10.rt1a. | | | | |
| 816 | X14168 | Human pLC46 with | 5.00E−16 | ZN44_HUMAN | ZINC FINGER PROTEIN | 1.6 |
| | | DNA replication | | | 44 (ZINC FINGER | |
| | | origin | | | PROTEIN KOX7) | |
| 817 | M19262 | Rat clathrin light | 0.28 | LMA_DROME | LAMININ ALPHA | 4.7 |
| | | chain (LCB3) | | | CHAIN PRECURSOR | |
| | | mRNA, complete | | | | |
| | | cds. | | | | |
| 818 | AF058055 | Mus musculus | 0.2 | <NONE> | <NONE> | <NONE> |
| | | monocarboxylate | | | | |
| | | transporter 1 | | | | |
| 819 | AB014570 | Homo sapiens | 0.16 | YGR1_YEAST | HYPOTHETICAL 34.8 | 4.00E−06 |
| | | mRNA for | | | KD PROTEIN IN SUT1- | |
| | | KIAA0670 protein, | | | RCK1 INTERGENIC | |
| | | partial cds | | | REGION | |
| 820 | M19262 | Rat clathrin light | 0.27 | LMA_DROME | LAMININ ALPHA | 4.5 |
| | | chain (LCB3) | | | CHAIN PRECURSOR | |
| | | mRNA, complete | | | | |
| | | cds. | | | | |
| 821 | Z54367 | H. sapiens gene for | 0.29 | YO93_CAEEL | HYPOTHETICAL 58.5 | 1.00E−14 |
| | | plectin | | | KD PROTEIN T20B12.3 | |
| | | | | | IN CHROMOSOME III | |
| 822 | AB017026 | Mus musculus | 0 | OXYB_HUMAN | OXYSTEROL-BINDING | 2.00E−49 |
| | | mRNA for | | | PROTEIN | |
| | | oxysterol-binding | | | | |
| | | protein, complete | | | | |
| | | cds | | | | |
| 823 | X58170 | M. musculus mRNA | 1.00E−20 | UL52_HSV11 | DNA | 5.3 |
| | | for t-Complex Tcp- | | | HELICASE/PRIMASE | |
| | | 10a gene | | | COMPLEX PROTEIN | |
| | | | | | (DNA REPLICATION | |
| | | | | | PROTEIN UL52) | |
| 824 | X58430 | Human Hox1.8 | 0 | HXAA_HUMAN | HOMEOBOX PROTEIN | 1.00E−44 |
| | | gene | | | HOX-A10 (HOX-1H) | |
| | | | | | (HOX-1.8) (PL) | |
| 825 | X53754 | Porcine | 1.3 | <NONE> | <NONE> | <NONE> |
| | | sarcoplasmic/endopl | | | | |
| | | asmic-reticulum | | | | |
| | | Ca(2+) pump gene 2 | | | | |
| | | 3′ -end region | | | | |
| 826 | AB005786 | Arabidopsis thaliana | 0.46 | <NONE> | <NONE> | <NONE> |
| | | tRNA-Glu gene | | | | |
| 827 | AB012130 | Homo sapiens | 1.9 | <NONE> | <NONE> | <NONE> |
| | | SBC2 mRNA for | | | | |
| | | sodium bicarbonate | | | | |
| | | cotransporter2, | | | | |
| | | complete cds | | | | |
| 828 | AB017430 | Homo sapiens | 0 | YBAV_ECOLI | HYPOTHETICAL 12.7 | 0.063 |
| | | mRNA for kinesin- | | | KD PROTEIN IN HUPB- | |
| | | like DNA binding | | | COF INTERGENIC | |
| | | protein, complete | | | REGION | |
| | | cds | | | | |
| 829 | AB007886 | Homo sapiens | 0.042 | YDF3_SCHPO | PROBABLE | 0.52 |
| | | KIAA0426 mRNA, | | | EUKARYOTIC | |
| | | complete cds | | | INITIATION FACTOR | |
| | | | | | C17C9.03 | |
| 830 | AB018335 | Homo sapiens | e−172 | UROT_BOVIN | TISSUE PLASMINOGEN | 0.86 |
| | | mRNA for | | | ACTIVATOR | |
| | | KIAA0792 protein, | | | PRECURSOR (EC | |
| | | complete cds | | | 3.4.21.68) | |
| 831 | D12646 | Mouse kif4 mRNA | 0 | KIF4_MOUSE | KINESIN-LIKE PROTEIN | 9.00E−96 |
| | | for microtubule− | | | KIF4 | |
| | | based motor protein | | | | |
| | | KIF4, complete cds | | | | |
| 832 | U38376 | Rattus norvegicus | 0.048 | <NONE> | <NONE> | <NONE> |
| | | cytosolic | | | | |
| | | phospholipase A2 | | | | |
| | | mRNA, complete | | | | |
| | | cds | | | | |
| 833 | L40411 | Homo sapiens | 0 | TRI8_HUMAN | THYROID RECEPTOR | 4.00E−86 |
| | | thyroid receptor | | | INTERACTING PROTEIN | |
| | | interactor | | | 8 (TRIP8) | |
| 834 | U08110 | Mus musculus | 8.00E−04 | YNW7_YEAST | HYPOTHETICAL 68.8 | 0.02 |
| | | RNA1 homolog | | | KD PROTEIN IN URE2- | |
| | | (Fug1) mRNA, | | | SSU72 INTERGENIC | |
| | | complete cds. | | | REGION | |
| 835 | D50646 | Mouse mRNA for | 1.00E−40 | YB64_YEAST | HYPOTHETICAL 57.2 | 4.9 |
| | | SDF2, complete cds | | | KD PROTEIN IN MET8- | |
| | | | | | HPC2 INTERGENIC | |
| | | | | | REGION | |
| 836 | D50646 | Mouse mRNA for | 1.00E−40 | YB64_YEAST | HYPOTHETICAL 57.2 | 4.9 |
| | | SDF2, complete cds | | | KD PROTEIN IN MET8- | |
| | | | | | HPC2 INTERGENIC | |
| | | | | | REGION | |
| 837 | U67459 | Methanococcus | 5.00E−05 | GCS1_HUMAN | MANNOSYL- | 9.2 |
| | | jannaschii section 1 | | | OLIGOSACCHARIDE | |
| | | of 150 of the | | | GLUCOSIDASE (EC | |
| | | complete genome | | | 3.2.1.106) | |
| 838 | U18657 | Haemophilus | 0.01 | STE6_YEAST | MATING FACTOR A | 7 |
| | | influenzae LeuA | | | SECRETION PROTEIN | |
| | | (leuA) gene, partial | | | STE6 (MULTIPLE DRUG | |
| | | cds, DprA (dprA+), | | | RESISTANCE PROTEIN | |
| | | orf272 and orf193 | | | HOMOLOG) (P- | |
| | | genes, complete cds, | | | GLYCOPROTEIN) | |
| | | and PfkA (pfkA) | | | | |
| | | gene, partial cds. | | | | |
| 839 | U12523 | Rattus norvegicus | 1.00E−10 | YMT8_YEAST | HYPOTHETICAL 36.4 | 2.00E−06 |
| | | ultraviolet B | | | KD PROTEIN IN | |
| | | radiation-activated | | | NUP116-FAR3 | |
| | | UV98 mRNA, | | | INTERGENIC REGION | |
| | | partial sequence. | | | | |
| 840 | D78255 | Mouse mRNA for | e−175 | <NONE> | <NONE> | <NONE> |
| | | PAP-1, complete | | | | |
| | | cds | | | | |
| 841 | D17263 | Human HepG2 3′ | 1.00E−58 | <NONE> | <NONE> | <NONE> |
| | | region MboI cDNA, | | | | |
| | | clone hmd5f07m3 | | | | |
| 842 | AF006751 | Homo sapiens | 0.061 | YRP2_YEAST | HYPOTHETICAL 84.4 | 2.00E−07 |
| | | ES/130 mRNA, | | | KD PROTEIN IN | |
| | | complete cds | | | RPC2/RET1 3′ REGION | |
| 843 | U67459 | Methanococcus | 6.00E−05 | YC14_METJA | HYPOTHETICAL | 8.1 |
| | | jannaschii section 1 | | | PROTEIN MJ1214 | |
| | | of 150 of the | | | | |
| | | complete genome | | | | |
| 844 | D88689 | Mus musculus | 0.084 | ICP0_HSV2H | TRANS-ACTING | 0.014 |
| | | mRNA for flt-1, | | | TRANSCRIPTIONAL | |
| | | complete cds | | | PROTEIN ICP0 (VMW118 | |
| | | | | | PROTEIN) | |

[0482] TABLE 5
All Differential Data for Libs 1-4 and 8-9

| | Cluster | Clones in | Clones in | Clones in | Clones in | Clones in | Clones in |
|---|---|---|---|---|---|---|---|
| Clone Name | ID | Lib1 | Lib2 | Lib3 | Lib4 | Lib8 | Lib9 |
| M00001340B:A06 | 17062 | 3 | 0 | 0 | 0 | 0 | 0 |
| M00001340D:F10 | 11589 | 2 | 2 | 1 | 3 | 3 | 8 |
| M00001341A:E12 | 4443 | 10 | 6 | 2 | 6 | 3 | 11 |
| M00001342B:E06 | 39805 | 2 | 0 | 0 | 0 | 1 | 0 |
| M00001343C:F10 | 2790 | 7 | 15 | 13 | 14 | 6 | 0 |
| M00001343D:H07 | 23255 | 3 | 0 | 1 | 1 | 0 | 0 |
| M00001345A:E01 | 6420 | 8 | 0 | 2 | 0 | 1 | 0 |
| M00001346A:F09 | 5007 | 4 | 8 | 3 | 6 | 2 | 6 |
| M00001346D:E03 | 6806 | 5 | 2 | 1 | 2 | 0 | 3 |
| M00001346D:G06 | 5779 | 5 | 4 | 3 | 4 | 0 | 0 |
| M00001346D:G06 | 5779 | 5 | 4 | 3 | 4 | 0 | 0 |
| M00001347A:B10 | 13576 | 5 | 0 | 0 | 0 | 12 | 11 |
| M00001348B:B04 | 16927 | 4 | 0 | 0 | 2 | 0 | 0 |
| M00001348B:G06 | 16985 | 4 | 0 | 0 | 0 | 0 | 0 |
| M00001349B:B08 | 3584 | 5 | 11 | 5 | 0 | 0 | 2 |
| M00001350A:H01 | 7187 | 5 | 3 | 1 | 0 | 1 | 0 |
| M00001351B:A08 | 3162 | 10 | 14 | 1 | 6 | 6 | 5 |
| M00001351B:A08 | 3162 | 10 | 14 | 1 | 6 | 6 | 5 |
| M00001352A:E02 | 16245 | 4 | 0 | 0 | 0 | 0 | 0 |
| M00001353A:G12 | 8078 | 4 | 3 | 1 | 0 | 1 | 0 |
| M00001353D:D10 | 14929 | 4 | 0 | 0 | 1 | 23 | 16 |
| M00001355B:G10 | 14391 | 3 | 1 | 0 | 0 | 0 | 0 |
| M00001357D:D11 | 4059 | 8 | 6 | 8 | 16 | 0 | 1 |
| M00001361A:A05 | 4141 | 5 | 2 | 10 | 16 | 4 | 27 |
| M00001361D:F08 | 2379 | 26 | 13 | 4 | 2 | 2 | 3 |
| M00001362B:D10 | 5622 | 7 | 4 | 2 | 13 | 1 | 2 |
| M00001362C:H11 | 945 | 9 | 21 | 2 | 1 | 0 | 0 |
| M00001365C:C10 | 40132 | 2 | 0 | 0 | 0 | 3 | 0 |
| M00001370A:C09 | 6867 | 7 | 3 | 0 | 0 | 0 | 0 |
| M00001371C:E09 | 7172 | 3 | 5 | 1 | 2 | 0 | 1 |
| M00001376B:G06 | 17732 | 1 | 3 | 5 | 0 | 1 | 4 |
| M00001378B:B02 | 39833 | 2 | 0 | 0 | 0 | 0 | 0 |
| M00001379A:A05 | 1334 | 27 | 38 | 35 | 28 | 3 | 0 |
| M00001380D:B09 | 39886 | 2 | 0 | 0 | 0 | 0 | 0 |
| M00001382C:A02 | 22979 | 2 | 1 | 0 | 0 | 0 | 0 |
| M00001383A:C03 | 39648 | 2 | 0 | 0 | 0 | 0 | 0 |
| M00001383A:C03 | 39648 | 2 | 0 | 0 | 0 | 0 | 0 |
| M00001386C:B12 | 5178 | 5 | 5 | 4 | 2 | 5 | 2 |
| M00001387A:C05 | 2464 | 5 | 19 | 25 | 16 | 1 | 0 |
| M00001387B:G03 | 7587 | 6 | 2 | 1 | 0 | 0 | 0 |
| M00001388D:G05 | 5832 | 10 | 3 | 0 | 1 | 5 | 0 |
| M00001389A:C08 | 16269 | 3 | 0 | 0 | 0 | 1 | 1 |
| M00001394A:F01 | 6583 | 2 | 7 | 3 | 2 | 0 | 0 |
| M00001395A:C03 | 4016 | 5 | 14 | 0 | 6 | 0 | 0 |
| M00001396A:C03 | 4009 | 6 | 4 | 13 | 5 | 4 | 10 |
| M00001402A:E08 | 39563 | 2 | 0 | 0 | 0 | 0 | 0 |
| M00001407B:D11 | 5556 | 8 | 1 | 5 | 0 | 2 | 0 |
| M00001409C:D12 | 9577 | 5 | 2 | 0 | 1 | 11 | 12 |
| M00001410A:D07 | 7005 | 8 | 2 | 0 | 0 | 0 | 0 |
| M00001412B:B10 | 8551 | 4 | 4 | 0 | 3 | 0 | 0 |
| M00001415A:H06 | 13538 | 5 | 0 | 0 | 0 | 9 | 1 |
| M00001416A:H01 | 7674 | 5 | 2 | 0 | 5 | 0 | 0 |
| M00001416B:H11 | 8847 | 4 | 1 | 3 | 0 | 6 | 1 |
| M00001417A:E02 | 36393 | 2 | 0 | 0 | 1 | 0 | 0 |
| M00001418B:F03 | 9952 | 4 | 2 | 1 | 1 | 0 | 0 |
| M00001418D:B06 | 8526 | 3 | 2 | 1 | 5 | 1 | 0 |
| M00001421C:F01 | 9577 | 5 | 2 | 0 | 1 | 11 | 12 |
| M00001423B:E07 | 15066 | 4 | 0 | 0 | 0 | 0 | 0 |
| M00001424B:G09 | 10470 | 5 | 1 | 0 | 2 | 0 | 1 |
| M00001425B:H08 | 22195 | 3 | 0 | 0 | 0 | 0 | 0 |
| M00001426D:C08 | 4261 | 4 | 9 | 7 | 9 | 12 | 15 |
| M00001428A:H10 | 84182 | 1 | 0 | 0 | 0 | 0 | 0 |
| M00001429A:H04 | 2797 | 15 | 11 | 18 | 16 | 1 | 14 |
| M00001429B:A11 | 4635 | 7 | 9 | 2 | 0 | 0 | 0 |
| M00001429D:D07 | 40392 | 2 | 0 | 1 | 8 | 12 | 16 |
| M00001439C:F08 | 40054 | 1 | 0 | 0 | 0 | 0 | 0 |
| M00001442C:D07 | 16731 | 3 | 1 | 0 | 0 | 0 | 0 |
| M00001445A:F05 | 13532 | 3 | 2 | 1 | 0 | 1 | 2 |
| M00001446A:F05 | 7801 | 5 | 2 | 4 | 6 | 1 | 0 |
| M00001447A:G03 | 10717 | 7 | 2 | 0 | 5 | 8 | 0 |
| M00001448D:C09 | 8 | 1850 | 2127 | 1703 | 3133 | 1355 | 122 |
| M00001448D:H01 | 36313 | 2 | 0 | 0 | 0 | 1 | 30 |
| M00001449A:A12 | 5857 | 6 | 2 | 3 | 4 | 0 | 0 |
| M00001449A:B12 | 41633 | 1 | 1 | 0 | 0 | 0 | 0 |
| M00001449A:D12 | 3681 | 12 | 5 | 10 | 1 | 2 | 5 |
| M00001449A:G10 | 36535 | 2 | 0 | 0 | 0 | 0 | 0 |
| M00001449C:D06 | 86110 | 1 | 0 | 0 | 0 | 0 | 0 |
| M00001450A:A02 | 39304 | 2 | 0 | 0 | 0 | 0 | 0 |
| M00001450A:A11 | 32663 | 1 | 1 | 0 | 0 | 0 | 0 |
| M00001450A:B12 | 82498 | 1 | 0 | 0 | 0 | 0 | 0 |
| M00001450A:D08 | 27250 | 2 | 0 | 0 | 0 | 0 | 0 |
| M00001452A:B04 | 84328 | 1 | 0 | 0 | 0 | 0 | 0 |
| M00001452A:B12 | 86859 | 1 | 0 | 0 | 0 | 0 | 0 |
| M00001452A:D08 | 1120 | 44 | 41 | 5 | 11 | 5 | 0 |
| M00001452A:F05 | 85064 | 1 | 0 | 0 | 0 | 0 | 0 |
| M00001452C:B06 | 16970 | 4 | 0 | 0 | 0 | 3 | 4 |
| M00001453A:E11 | 16130 | 3 | 1 | 0 | 0 | 0 | 1 |
| M00001453C:F06 | 16653 | 3 | 1 | 0 | 0 | 0 | 0 |
| M00001454A:A09 | 83103 | 1 | 0 | 0 | 0 | 0 | 0 |
| M00001454B:C12 | 7005 | 8 | 2 | 0 | 0 | 0 | 0 |
| M00001454D:G03 | 689 | 58 | 95 | 17 | 36 | 66 | 95 |
| M00001455A:E09 | 13238 | 4 | 1 | 0 | 0 | 0 | 0 |
| M00001455B:E12 | 13072 | 4 | 1 | 0 | 0 | 0 | 0 |
| M00001455D:F09 | 9283 | 4 | 1 | 0 | 1 | 0 | 1 |
| M00001455D:F09 | 9283 | 4 | 1 | 0 | 1 | 0 | 1 |
| M00001460A:F06 | 2448 | 23 | 22 | 2 | 3 | 3 | 1 |
| M00001460A:F12 | 39498 | 2 | 0 | 0 | 0 | 0 | 0 |
| M00001461A:D06 | 1531 | 20 | 23 | 32 | 17 | 14 | 14 |
| M00001463C:B11 | 19 | 1415 | 1203 | 1364 | 525 | 479 | 774 |
| M00001465A:B11 | 10145 | 2 | 0 | 2 | 0 | 0 | 0 |
| M00001466A:E07 | 4275 | 11 | 2 | 5 | 0 | 4 | 2 |
| M00001467A:B07 | 38759 | 2 | 0 | 0 | 0 | 1 | 1 |
| M00001467A:D04 | 39508 | 2 | 0 | 0 | 0 | 0 | 0 |
| M00001467A:D08 | 16283 | 3 | 0 | 0 | 0 | 0 | 0 |
| M00001467A:D08 | 16283 | 3 | 0 | 0 | 0 | 0 | 0 |
| M00001467A:E10 | 39442 | 2 | 0 | 0 | 0 | 0 | 0 |
| M00001468A:F05 | 7589 | 6 | 2 | 1 | 1 | 1 | 0 |
| M00001469A:C10 | 12081 | 4 | 0 | 0 | 0 | 0 | 0 |
| M00001469A:H12 | 19105 | 2 | 0 | 2 | 0 | 1 | 0 |
| M00001470A:B10 | 1037 | 53 | 48 | 4 | 22 | 0 | 0 |
| M00001470A:C04 | 39425 | 2 | 0 | 0 | 0 | 0 | 0 |
| M00001471A:B01 | 39478 | 2 | 0 | 0 | 0 | 0 | 0 |
| M00001481D:A05 | 7985 | 3 | 1 | 4 | 0 | 1 | 0 |
| M00001490B:C04 | 18699 | 2 | 1 | 0 | 0 | 0 | 3 |
| M00001494D:F06 | 7206 | 4 | 3 | 3 | 1 | 2 | 0 |
| M00001497A:G02 | 2623 | 12 | 4 | 31 | 4 | 6 | 1 |
| M00001499B:A11 | 10539 | 2 | 1 | 1 | 0 | 1 | 0 |
| M00001500A:C05 | 5336 | 9 | 2 | 4 | 8 | 3 | 15 |
| M00001500A:E11 | 2623 | 12 | 4 | 31 | 4 | 6 | 1 |
| M00001500C:E04 | 9443 | 4 | 2 | 1 | 1 | 0 | 0 |
| M00001501D:C02 | 9685 | 3 | 2 | 0 | 7 | 2 | 3 |
| M00001504C:A07 | 10185 | 5 | 1 | 0 | 0 | 2 | 4 |
| M00001504C:H06 | 6974 | 7 | 3 | 0 | 1 | 0 | 0 |
| M00001504D:G06 | 6420 | 8 | 0 | 2 | 0 | 1 | 0 |
| M00001507A:H05 | 39168 | 2 | 0 | 0 | 0 | 0 | 0 |
| M00001511A:H06 | 39412 | 2 | 0 | 0 | 0 | 0 | 0 |
| M00001512A:A09 | 39186 | 2 | 0 | 0 | 0 | 0 | 0 |
| M00001512D:G09 | 3956 | 9 | 9 | 5 | 2 | 0 | 0 |
| M00001513A:B06 | 4568 | 10 | 4 | 0 | 9 | 2 | 0 |
| M00001513C:E08 | 14364 | 1 | 0 | 0 | 0 | 0 | 0 |
| M00001514C:D11 | 40044 | 2 | 0 | 0 | 0 | 0 | 0 |
| M00001517A:B07 | 4313 | 13 | 6 | 1 | 0 | 1 | 0 |
| M00001518C:B11 | 8952 | 3 | 4 | 0 | 4 | 2 | 0 |
| M00001528A:C04 | 7337 | 4 | 4 | 3 | 16 | 12 | 21 |
| M00001528A:F09 | 18957 | 3 | 0 | 0 | 0 | 0 | 0 |
| M00001528B:H04 | 8358 | 3 | 3 | 2 | 0 | 0 | 0 |
| M00001531A:D01 | 38085 | 2 | 0 | 0 | 0 | 0 | 0 |
| M00001532B:A06 | 3990 | 6 | 12 | 4 | 1 | 3 | 1 |
| M00001533A:C11 | 2428 | 14 | 14 | 13 | 9 | 2 | 19 |
| M00001534A:C04 | 16921 | 4 | 0 | 0 | 1 | 2 | 1 |
| M00001534A:D09 | 5097 | 6 | 5 | 1 | 1 | 3 | 2 |
| M00001534A:F09 | 5321 | 11 | 7 | 1 | 5 | 10 | 26 |
| M00001534C:A01 | 4119 | 9 | 4 | 2 | 2 | 5 | 3 |
| M00001535A:B01 | 7665 | 3 | 1 | 5 | 0 | 0 | 0 |
| M00001535A:C06 | 20212 | 2 | 0 | 1 | 1 | 0 | 0 |
| M00001535A:F10 | 39423 | 2 | 0 | 0 | 0 | 0 | 0 |
| M00001536A:B07 | 2696 | 23 | 11 | 9 | 18 | 10 | 21 |
| M00001536A:C08 | 39392 | 2 | 0 | 0 | 0 | 0 | 0 |
| M00001537A:F12 | 39420 | 2 | 0 | 0 | 0 | 0 | 0 |
| M00001537B:G07 | 3389 | 4 | 11 | 13 | 2 | 0 | 0 |
| M00001540A:D06 | 8286 | 6 | 1 | 0 | 3 | 4 | 0 |
| M00001541A:D02 | 3765 | 19 | 6 | 0 | 0 | 0 | 0 |
| M00001541A:F07 | 22085 | 3 | 0 | 0 | 0 | 0 | 1 |
| M00001541A:H03 | 39174 | 2 | 0 | 0 | 0 | 0 | 0 |
| M00001542A:A09 | 22113 | 3 | 0 | 0 | 0 | 0 | 0 |
| M00001542A:E06 | 39453 | 2 | 0 | 0 | 0 | 0 | 0 |
| M00001544A:E03 | 12170 | 2 | 1 | 2 | 0 | 0 | 0 |
| M00001544A:G02 | 19829 | 2 | 0 | 1 | 0 | 0 | 0 |
| M00001544B:B07 | 6974 | 7 | 3 | 0 | 1 | 0 | 0 |
| M00001545A:C03 | 19255 | 2 | 0 | 0 | 0 | 0 | 0 |
| M00001545A:D08 | 13864 | 3 | 0 | 2 | 1 | 2 | 4 |
| M00001546A:G11 | 1267 | 43 | 55 | 5 | 0 | 0 | 0 |
| M00001548A:E10 | 5892 | 5 | 1 | 4 | 4 | 1 | 3 |
| M00001548A:H09 | 1058 | 40 | 44 | 37 | 47 | 39 | 59 |
| M00001549A:B02 | 4015 | 10 | 5 | 8 | 15 | 2 | 0 |
| M00001549A:D08 | 10944 | 3 | 0 | 3 | 1 | 0 | 7 |
| M00001549B:F06 | 4193 | 12 | 7 | 2 | 2 | 0 | 1 |
| M00001549C:E06 | 16347 | 4 | 0 | 0 | 0 | 0 | 0 |
| M00001550A:A03 | 7239 | 5 | 2 | 1 | 0 | 2 | 0 |
| M00001550A:G01 | 5175 | 8 | 1 | 3 | 2 | 0 | 0 |
| M00001551A:B10 | 6268 | 6 | 4 | 3 | 18 | 5 | 0 |
| M00001551A:F05 | 39180 | 2 | 0 | 0 | 0 | 0 | 0 |
| M00001551A:G06 | 22390 | 2 | 1 | 0 | 0 | 0 | 1 |
| M00001551C:G09 | 3266 | 12 | 14 | 0 | 1 | 0 | 6 |
| M00001552A:B12 | 307 | 73 | 60 | 196 | 75 | 79 | 27 |
| M00001552A:D11 | 39458 | 2 | 0 | 0 | 0 | 0 | 0 |
| M00001552B:D04 | 5708 | 5 | 4 | 4 | 3 | 1 | 4 |
| M00001553A:H06 | 8298 | 4 | 3 | 1 | 3 | 0 | 0 |
| M00001553B:F12 | 4573 | 5 | 7 | 2 | 5 | 0 | 1 |
| M00001553D:D10 | 22814 | 3 | 0 | 0 | 0 | 0 | 0 |
| M00001555A:B02 | 39539 | 2 | 0 | 0 | 0 | 1 | 0 |
| M00001555A:C01 | 39195 | 2 | 0 | 0 | 0 | 0 | 0 |
| M00001555D:G10 | 4561 | 8 | 4 | 4 | 8 | 0 | 0 |
| M00001556A:C09 | 9244 | 2 | 0 | 3 | 2 | 10 | 17 |
| M00001556A:F11 | 1577 | 12 | 40 | 25 | 3 | 4 | 0 |
| M00001556A:H01 | 15855 | 2 | 1 | 1 | 2 | 12 | 213 |
| M00001556A:C08 | 4386 | 7 | 8 | 3 | 1 | 3 | 21 |
| M00001556B:G02 | 11294 | 4 | 0 | 2 | 0 | 0 | 1 |
| M00001557A:D02 | 7065 | 5 | 3 | 2 | 1 | 0 | 0 |
| M00001557A:D02 | 7065 | 5 | 3 | 2 | 1 | 0 | 0 |
| M00001557A:F01 | 9635 | 3 | 0 | 2 | 1 | 0 | 0 |
| M00001557A:F03 | 39490 | 2 | 0 | 0 | 0 | 1 | 0 |
| M00001557B:H10 | 5192 | 8 | 5 | 0 | 5 | 0 | 0 |
| M00001557D:D09 | 8761 | 3 | 4 | 0 | 1 | 0 | 1 |
| M00001558B:H11 | 7514 | 5 | 3 | 0 | 0 | 0 | 0 |
| M00001560D:F10 | 6558 | 4 | 3 | 4 | 0 | 0 | 5 |
| M00001561A:C05 | 39486 | 2 | 0 | 0 | 0 | 0 | 0 |
| M00001563B:F06 | 102 | 289 | 233 | 278 | 116 | 123 | 184 |
| M00001564A:B12 | 5053 | 11 | 4 | 2 | 2 | 1 | 1 |
| M00001571C:H06 | 5749 | 4 | 1 | 9 | 0 | 0 | 0 |
| M00001578B:E04 | 23001 | 2 | 1 | 0 | 2 | 0 | 0 |
| M00001579D:C03 | 6539 | 8 | 3 | 0 | 0 | 0 | 1 |
| M00001583D:A10 | 6293 | 3 | 5 | 2 | 6 | 0 | 0 |
| M00001586C:C05 | 4623 | 3 | 4 | 12 | 2 | 1 | 1 |
| M00001587A:B11 | 39380 | 2 | 0 | 0 | 0 | 0 | 0 |
| M00001594B:H04 | 260 | 189 | 188 | 27 | 2 | 15 | 0 |
| M00001597C:H02 | 4837 | 6 | 2 | 10 | 0 | 3 | 1 |
| M00001597D:C05 | 10470 | 5 | 1 | 0 | 2 | 0 | 1 |
| M00001598A:G03 | 16999 | 4 | 0 | 0 | 0 | 0 | 0 |
| M00001601A:D08 | 22794 | 2 | 0 | 0 | 0 | 0 | 0 |
| M00001604A:B10 | 1399 | 49 | 27 | 19 | 7 | 10 | 23 |
| M00001604A:F05 | 39391 | 2 | 0 | 0 | 0 | 0 | 0 |
| M00001607A:E11 | 11465 | 5 | 0 | 0 | 0 | 0 | 0 |
| M00001608A:B03 | 7802 | 5 | 4 | 0 | 1 | 0 | 0 |
| M00001608B:E03 | 22155 | 3 | 0 | 0 | 0 | 0 | 0 |
| M00001614C:F10 | 13157 | 4 | 1 | 0 | 3 | 1 | 0 |
| M00001617C:E02 | 17004 | 4 | 0 | 1 | 0 | 1 | 0 |
| M00001619C:F12 | 40314 | 2 | 0 | 0 | 0 | 1 | 0 |
| M00001621C:C08 | 40044 | 2 | 0 | 0 | 0 | 0 | 0 |
| M00001623D:F10 | 13913 | 2 | 1 | 2 | 0 | 0 | 1 |
| M00001624A:B06 | 3277 | 10 | 11 | 8 | 3 | 5 | 1 |
| M00001624C:F01 | 4309 | 4 | 13 | 3 | 10 | 0 | 0 |
| M00001630B:H09 | 5214 | 10 | 2 | 2 | 2 | 4 | 3 |
| M00001644C:B07 | 39171 | 2 | 0 | 0 | 0 | 0 | 0 |
| M00001645A:C12 | 19267 | 2 | 0 | 0 | 0 | 0 | 1 |
| M00001648C:A01 | 4665 | 5 | 9 | 0 | 0 | 0 | 0 |
| M00001657D:C03 | 23201 | 3 | 0 | 0 | 0 | 3 | 0 |
| M00001657D:F08 | 76760 | 1 | 0 | 2 | 2 | 0 | 5 |
| M00001662C:A09 | 23218 | 3 | 0 | 0 | 0 | 0 | 0 |
| M00001663A:E04 | 35702 | 2 | 0 | 0 | 0 | 0 | 0 |
| M00001669B:F02 | 6468 | 4 | 3 | 3 | 8 | 1 | 0 |
| M00001670C:H02 | 14367 | 3 | 0 | 0 | 0 | 0 | 0 |
| M00001673C:H02 | 7015 | 6 | 3 | 1 | 2 | 1 | 1 |
| M00001675A:C09 | 8773 | 4 | 1 | 4 | 4 | 4 | 6 |
| M00001676B:F05 | 11460 | 4 | 2 | 0 | 0 | 0 | 0 |
| M00001677C:E10 | 14627 | 1 | 2 | 1 | 0 | 1 | 0 |
| M00001677D:A07 | 7570 | 5 | 3 | 0 | 0 | 0 | 0 |
| M00001678D:F12 | 4416 | 9 | 5 | 2 | 6 | 1 | 3 |
| M00001679A:A06 | 6660 | 7 | 0 | 4 | 2 | 1 | 0 |
| M00001679A:F10 | 26875 | 1 | 0 | 0 | 0 | 1 | 0 |
| M00001679B:F01 | 6298 | 2 | 4 | 5 | 3 | 1 | 0 |
| M00001679C:F01 | 78091 | 1 | 0 | 0 | 0 | 0 | 0 |
| M00001679D:D03 | 10751 | 3 | 2 | 0 | 1 | 0 | 1 |
| M00001679D:D03 | 10751 | 3 | 2 | 0 | 1 | 0 | 1 |
| M00001680D:F08 | 10539 | 2 | 1 | 1 | 0 | 1 | 0 |
| M00001682C:B12 | 17055 | 4 | 0 | 0 | 0 | 0 | 0 |
| M00001686A:E06 | 4622 | 7 | 6 | 4 | 2 | 3 | 0 |
| M00001688C:F09 | 5382 | 6 | 2 | 6 | 2 | 0 | 3 |
| M00001693C:G01 | 4393 | 10 | 6 | 2 | 4 | 1 | 1 |
| M00001716D:H05 | 67252 | 1 | 0 | 0 | 1 | 0 | 0 |
| M00003741D:C09 | 40108 | 2 | 0 | 0 | 0 | 0 | 0 |
| M00003747D:C05 | 11476 | 6 | 0 | 0 | 0 | 0 | 0 |
| M00003759B:B09 | 697 | 76 | 52 | 30 | 72 | 21 | 30 |
| M00003762C:B08 | 17076 | 4 | 0 | 0 | 0 | 0 | 0 |
| M00003763A:F06 | 3108 | 14 | 11 | 7 | 5 | 0 | 1 |
| M00003774C:A03 | 67907 | 1 | 0 | 0 | 0 | 0 | 0 |
| M00003796C:D05 | 5619 | 3 | 5 | 3 | 3 | 0 | 4 |
| M00003826B:A06 | 11350 | 3 | 3 | 0 | 0 | 1 | 0 |
| M00003833A:E05 | 21877 | 2 | 1 | 0 | 0 | 0 | 1 |
| M00003837D:A01 | 7899 | 5 | 4 | 0 | 2 | 1 | 0 |
| M00003839A:D08 | 7798 | 5 | 2 | 2 | 0 | 0 | 1 |
| M00003844C:B11 | 6539 | 8 | 3 | 0 | 0 | 0 | 1 |
| M00003846B:D06 | 6874 | 6 | 3 | 0 | 0 | 0 | 0 |
| M00003851B:D10 | 13595 | 4 | 0 | 1 | 0 | 0 | 1 |
| M00003853A:D04 | 5619 | 3 | 5 | 3 | 3 | 0 | 4 |
| M00003853A:F12 | 10515 | 5 | 1 | 0 | 1 | 1 | 2 |
| M00003856B:C02 | 4622 | 7 | 6 | 4 | 2 | 3 | 0 |
| M00003857A:G10 | 3389 | 4 | 11 | 13 | 2 | 0 | 0 |
| M00003857A:H03 | 4718 | 4 | 5 | 5 | 2 | 4 | 6 |
| M00003871C:E02 | 4573 | 5 | 7 | 2 | 5 | 0 | 1 |
| M00003875B:F04 | 12977 | 5 | 0 | 0 | 0 | 0 | 0 |
| M00003875B:F04 | 12977 | 5 | 0 | 0 | 0 | 0 | 0 |
| M00003875C:G07 | 8479 | 4 | 3 | 1 | 1 | 2 | 4 |
| M00003876D:E12 | 7798 | 5 | 2 | 2 | 0 | 0 | 1 |
| M00003879B:C11 | 5345 | 7 | 1 | 7 | 4 | 6 | 27 |
| M00003879B:D10 | 31587 | 1 | 1 | 0 | 0 | 1 | 0 |
| M00003879D:A02 | 14507 | 3 | 1 | 0 | 0 | 3 | 1 |
| M00003885C:A02 | 13576 | 5 | 0 | 0 | 0 | 12 | 11 |
| M00003885C:A02 | 13576 | 5 | 0 | 0 | 0 | 12 | 11 |
| M00003906C:E10 | 9285 | 4 | 3 | 0 | 0 | 1 | 2 |
| M00003907D:A09 | 39809 | 1 | 0 | 0 | 0 | 2 | 1 |
| M00003907D:H04 | 16317 | 3 | 0 | 0 | 0 | 0 | 0 |
| M00003909D:C03 | 8672 | 4 | 4 | 0 | 0 | 0 | 0 |
| M00003912B:D01 | 12532 | 4 | 1 | 0 | 1 | 0 | 1 |
| M00003914C:F05 | 3900 | 9 | 6 | 8 | 1 | 7 | 13 |
| M00003922A:E06 | 23255 | 3 | 0 | 1 | 1 | 0 | 0 |
| M00003958A:H02 | 18957 | 3 | 0 | 0 | 0 | 0 | 0 |
| M00003958A:H02 | 18957 | 3 | 0 | 0 | 0 | 0 | 0 |
| M00003958C:G10 | 40455 | 2 | 0 | 0 | 0 | 0 | 0 |
| M00003958C:G10 | 40455 | 2 | 0 | 0 | 0 | 0 | 0 |
| M00003968B:F06 | 24488 | 2 | 0 | 1 | 4 | 0 | 0 |
| M00003970C:B09 | 40122 | 2 | 0 | 0 | 0 | 0 | 0 |
| M00003974D:E07 | 23210 | 3 | 0 | 0 | 0 | 0 | 0 |
| M00003974D:H02 | 23358 | 3 | 0 | 0 | 0 | 1 | 0 |
| M00003975A:G11 | 12439 | 4 | 0 | 0 | 0 | 0 | 0 |
| M00003978B:G05 | 5693 | 7 | 4 | 1 | 3 | 1 | 1 |
| M00003981A:E10 | 3430 | 9 | 10 | 7 | 3 | 0 | 0 |
| M00003982C:C02 | 2433 | 10 | 13 | 21 | 18 | 8 | 8 |
| M00003983A:A05 | 9105 | 5 | 1 | 1 | 1 | 0 | 0 |
| M00004028D:A06 | 6124 | 4 | 8 | 1 | 9 | 1 | 0 |
| M00004028D:C05 | 40073 | 2 | 0 | 1 | 0 | 0 | 1 |
| M00004031A:A12 | 9061 | 5 | 2 | 0 | 0 | 0 | 0 |
| M00004031A:A12 | 9061 | 5 | 2 | 0 | 0 | 0 | 0 |
| M00004035C:A07 | 37285 | 2 | 0 | 0 | 1 | 0 | 1 |
| M00004035D:B06 | 17036 | 4 | 0 | 0 | 0 | 0 | 0 |
| M00004059A:D06 | 5417 | 10 | 4 | 0 | 9 | 2 | 0 |
| M00004068B:A01 | 3706 | 7 | 14 | 4 | 22 | 1 | 0 |
| M00004072B:B05 | 17036 | 4 | 0 | 0 | 0 | 0 | 0 |
| M00004081C:D10 | 15069 | 3 | 0 | 0 | 1 | 0 | 0 |
| M00004081C:D12 | 14391 | 3 | 1 | 0 | 0 | 0 | 0 |
| M00004086D:G06 | 9285 | 4 | 3 | 0 | 0 | 1 | 2 |
| M00004087D:A01 | 6880 | 2 | 6 | 1 | 1 | 0 | 0 |
| M00004093D:B12 | 5325 | 5 | 5 | 2 | 0 | 2 | 1 |
| M00004093D:B12 | 5325 | 5 | 5 | 2 | 0 | 2 | 1 |
| M00004105C:A04 | 7221 | 5 | 2 | 2 | 2 | 0 | 0 |
| M00004108A:E06 | 4937 | 4 | 9 | 3 | 1 | 3 | 1 |
| M00004111D:A08 | 6874 | 6 | 3 | 0 | 0 | 0 | 0 |
| M00004114C:F11 | 13183 | 2 | 3 | 0 | 7 | 0 | 1 |
| M00004138B:H02 | 13272 | 3 | 2 | 0 | 3 | 0 | 0 |
| M00004146C:C11 | 5257 | 2 | 8 | 5 | 5 | 5 | 25 |
| M00004151D:B08 | 16977 | 4 | 0 | 0 | 0 | 0 | 0 |
| M00004157C:A09 | 6455 | 3 | 1 | 6 | 0 | 0 | 0 |
| M00004169C:C12 | 5319 | 6 | 2 | 8 | 2 | 2 | 3 |
| M00004171D:B03 | 4908 | 6 | 7 | 2 | 2 | 2 | 0 |
| M00004172C:D08 | 11494 | 4 | 0 | 0 | 0 | 0 | 0 |
| M00004183C:D07 | 16392 | 3 | 0 | 0 | 0 | 0 | 0 |
| M00004185C:C03 | 11443 | 5 | 1 | 0 | 0 | 0 | 0 |
| M00004197D:H01 | 8210 | 2 | 6 | 0 | 0 | 0 | 0 |
| M00004203B:C12 | 14311 | 4 | 0 | 0 | 0 | 1 | 2 |
| M00004212B:C07 | 2379 | 26 | 13 | 4 | 2 | 2 | 3 |
| M00004214C:H05 | 11451 | 3 | 2 | 1 | 2 | 1 | 1 |
| M00004223A:G10 | 16918 | 4 | 0 | 0 | 0 | 0 | 0 |
| M00004223B:D09 | 7899 | 5 | 4 | 0 | 2 | 1 | 0 |
| M00004223D:E04 | 12971 | 4 | 0 | 0 | 0 | 1 | 0 |
| M00004229B:F08 | 6455 | 3 | 1 | 6 | 0 | 0 | 0 |
| M00004230B:C07 | 7212 | 3 | 5 | 2 | 1 | 3 | 0 |
| M00004269D:D06 | 4905 | 7 | 6 | 3 | 1 | 3 | 1 |
| M00004275C:C11 | 16914 | 3 | 0 | 0 | 1 | 0 | 0 |
| M00004283B:A04 | 14286 | 3 | 1 | 0 | 1 | 1 | 1 |
| M00004285B:E08 | 56020 | 1 | 0 | 0 | 0 | 0 | 0 |
| M00004295D:F12 | 16921 | 4 | 0 | 0 | 1 | 2 | 1 |
| M00004296C:H07 | 13046 | 4 | 1 | 0 | 1 | 0 | 0 |
| M00004307C:A06 | 9457 | 2 | 0 | 5 | 0 | 3 | 0 |
| M00004312A:G03 | 26295 | 2 | 0 | 0 | 0 | 0 | 0 |
| M00004318C:D10 | 21847 | 2 | 1 | 0 | 0 | 0 | 0 |
| M00004372A:A03 | 2030 | 13 | 10 | 32 | 4 | 0 | 0 |
| M00004377C:F05 | 2102 | 12 | 20 | 23 | 21 | 6 | 5 |

[0483] TABLE 6
All Differential Data for Libs 15-20

| | Cluster | Clones in | Clones in | Clones in | Clones in | Clones in | Clones in |
|---|---|---|---|---|---|---|---|
| Clone Name | ID | Lib15 | Lib16b | Lib17 | Lib18 | Lib19 | Lib20 |
| M00001340B:A06 | 17062 | 0 | 0 | 0 | 0 | 0 | 0 |
| M00001340D:F10 | 11589 | 0 | 0 | 0 | 0 | 0 | 0 |
| M00001341A:E12 | 4443 | 0 | 0 | 0 | 1 | 0 | 0 |
| M00001342B:E06 | 39805 | 0 | 0 | 0 | 0 | 0 | 0 |
| M00001343C:F10 | 2790 | 0 | 0 | 0 | 0 | 0 | 0 |
| M00001343D:H07 | 23255 | 0 | 0 | 0 | 0 | 0 | 0 |
| M00001345A:E01 | 6420 | 0 | 0 | 0 | 0 | 0 | 0 |
| M00001346A:F09 | 5007 | 0 | 0 | 0 | 0 | 0 | 0 |
| M00001346D:E03 | 6806 | 0 | 0 | 0 | 0 | 0 | 0 |
| M00001346D:G06 | 5779 | 0 | 0 | 0 | 0 | 0 | 0 |
| M00001346D:G06 | 5779 | 0 | 0 | 0 | 0 | 0 | 0 |
| M00001347A:B10 | 13576 | 0 | 0 | 0 | 0 | 0 | 0 |
| M00001348B:B04 | 16927 | 0 | 0 | 0 | 0 | 0 | 0 |
| M00001348B:G06 | 16985 | 0 | 0 | 0 | 0 | 0 | 0 |
| M00001349B:B08 | 3584 | 0 | 0 | 0 | 0 | 0 | 0 |
| M00001350A:H01 | 7187 | 0 | 0 | 0 | 0 | 0 | 0 |
| M00001351B:A08 | 3162 | 0 | 1 | 0 | 0 | 1 | 0 |
| M00001351B:A08 | 3162 | 0 | 1 | 0 | 0 | 1 | 0 |
| M00001352A:E02 | 16245 | 0 | 0 | 0 | 0 | 0 | 0 |
| M00001353A:G12 | 8078 | 0 | 0 | 0 | 0 | 0 | 0 |
| M00001353D:D10 | 14929 | 0 | 3 | 1 | 0 | 5 | 0 |
| M00001355B:G10 | 14391 | 0 | 0 | 0 | 0 | 0 | 0 |
| M00001357D:D11 | 4059 | 0 | 0 | 0 | 0 | 0 | 0 |
| M00001361A:A05 | 4141 | 0 | 0 | 0 | 0 | 0 | 0 |
| M00001361D:F08 | 2379 | 0 | 0 | 0 | 0 | 0 | 0 |
| M00001362B:D10 | 5622 | 0 | 0 | 0 | 0 | 0 | 0 |
| M00001362C:H11 | 945 | 0 | 0 | 0 | 0 | 0 | 1 |
| M00001365C:C10 | 40132 | 0 | 0 | 0 | 0 | 0 | 0 |
| M00001370A:C09 | 6867 | 0 | 0 | 0 | 0 | 0 | 0 |
| M00001371C:E09 | 7172 | 0 | 0 | 0 | 0 | 0 | 0 |
| M00001376B:G06 | 17732 | 0 | 0 | 0 | 0 | 0 | 1 |
| M00001378B:B02 | 39833 | 0 | 0 | 0 | 0 | 0 | 0 |
| M00001379A:A05 | 1334 | 0 | 0 | 0 | 0 | 0 | 1 |
| M00001380D:B09 | 39886 | 0 | 0 | 0 | 0 | 0 | 0 |
| M00001382C:A02 | 22979 | 0 | 0 | 0 | 0 | 0 | 0 |
| M00001383A:C03 | 39648 | 0 | 0 | 0 | 0 | 0 | 0 |
| M00001383A:C03 | 39648 | 0 | 0 | 0 | 0 | 0 | 0 |
| M00001386C:B12 | 5178 | 0 | 0 | 0 | 0 | 0 | 0 |
| M00001387A:C05 | 2464 | 0 | 0 | 0 | 0 | 0 | 0 |
| M00001387B:G03 | 7587 | 0 | 0 | 0 | 0 | 0 | 0 |
| M00001388D:G05 | 5832 | 0 | 0 | 0 | 0 | 0 | 0 |
| M00001389A:C08 | 16269 | 0 | 1 | 0 | 0 | 0 | 0 |
| M00001394A:F01 | 6583 | 1 | 4 | 1 | 0 | 0 | 0 |
| M00001395A:C03 | 4016 | 0 | 0 | 0 | 0 | 0 | 0 |
| M00001396A:C03 | 4009 | 0 | 0 | 0 | 0 | 0 | 0 |
| M00001402A:E08 | 39563 | 0 | 0 | 0 | 0 | 0 | 0 |
| M00001407B:D11 | 5556 | 0 | 0 | 0 | 0 | 0 | 0 |
| M00001409C:D12 | 9577 | 0 | 0 | 0 | 0 | 0 | 0 |
| M00001410A:D07 | 7005 | 0 | 0 | 0 | 0 | 0 | 0 |
| M00001412B:B10 | 8551 | 0 | 0 | 0 | 0 | 0 | 0 |
| M00001415A:H06 | 13538 | 0 | 0 | 0 | 0 | 0 | 0 |
| M00001416A:H01 | 7674 | 0 | 0 | 0 | 0 | 0 | 0 |
| M00001416B:H11 | 8847 | 0 | 0 | 0 | 0 | 0 | 0 |
| M00001417A:E02 | 36393 | 0 | 0 | 0 | 0 | 0 | 0 |
| M00001418B:F03 | 9952 | 0 | 0 | 0 | 0 | 0 | 0 |
| M00001418D:B06 | 8526 | 0 | 0 | 0 | 0 | 0 | 0 |
| M00001421C:F01 | 9577 | 0 | 0 | 0 | 0 | 0 | 0 |
| M00001423B:E07 | 15066 | 0 | 0 | 0 | 0 | 0 | 0 |
| M00001424B:G09 | 10470 | 0 | 0 | 0 | 0 | 0 | 0 |
| M00001425B:H08 | 22195 | 0 | 0 | 0 | 0 | 0 | 0 |
| M00001426D:C08 | 4261 | 0 | 0 | 1 | 0 | 0 | 1 |
| M00001428A:H10 | 84182 | 0 | 0 | 0 | 0 | 0 | 0 |
| M00001429A:H04 | 2797 | 0 | 0 | 0 | 0 | 0 | 0 |
| M00001429B:A11 | 4635 | 0 | 0 | 0 | 0 | 0 | 0 |
| M00001429D:D07 | 40392 | 0 | 0 | 0 | 0 | 0 | 0 |
| M00001439C:F08 | 40054 | 0 | 0 | 0 | 0 | 0 | 0 |
| M00001442C:D07 | 16731 | 0 | 0 | 0 | 0 | 0 | 0 |
| M00001445A:F05 | 13532 | 0 | 0 | 0 | 0 | 0 | 0 |
| M00001446A:F05 | 7801 | 0 | 0 | 0 | 0 | 0 | 0 |
| M00001447A:G03 | 10717 | 0 | 0 | 0 | 0 | 0 | 0 |
| M00001448D:C09 | 8 | 1 | 6 | 6 | 1 | 14 | 1 |
| M00001448D:H01 | 36313 | 0 | 3 | 0 | 0 | 3 | 0 |
| M00001449A:A12 | 5857 | 0 | 0 | 0 | 0 | 0 | 0 |
| M00001449A:B12 | 41633 | 0 | 0 | 0 | 0 | 0 | 0 |
| M00001449A:D12 | 3681 | 0 | 0 | 0 | 0 | 0 | 0 |
| M00001449A:G10 | 36535 | 0 | 0 | 0 | 0 | 0 | 0 |
| M00001449C:D06 | 86110 | 0 | 0 | 0 | 0 | 0 | 0 |
| M00001450A:A02 | 39304 | 0 | 0 | 0 | 0 | 0 | 0 |
| M00001450A:A11 | 32663 | 0 | 0 | 0 | 0 | 0 | 0 |
| M00001450A:B12 | 82498 | 0 | 0 | 0 | 0 | 0 | 0 |
| M00001450A:D08 | 27250 | 0 | 0 | 0 | 0 | 0 | 0 |
| M00001452A:B04 | 84328 | 0 | 0 | 0 | 0 | 0 | 0 |
| M00001452A:B12 | 86859 | 0 | 0 | 0 | 0 | 0 | 0 |
| M00001452A:D08 | 1120 | 0 | 0 | 0 | 0 | 0 | 0 |
| M00001452A:F05 | 85064 | 0 | 0 | 0 | 0 | 0 | 0 |
| M00001452C:B06 | 16970 | 0 | 0 | 2 | 0 | 1 | 0 |
| M00001453A:E11 | 16130 | 0 | 0 | 0 | 0 | 0 | 0 |
| M00001453C:F06 | 16653 | 0 | 0 | 0 | 0 | 0 | 0 |
| M00001454A:A09 | 83103 | 0 | 0 | 0 | 0 | 0 | 0 |
| M00001454B:C12 | 7005 | 0 | 0 | 0 | 0 | 0 | 0 |
| M00001454D:G03 | 689 | 0 | 2 | 2 | 0 | 4 | 2 |
| M00001455A:E09 | 13238 | 0 | 0 | 0 | 0 | 0 | 0 |
| M00001455B:E12 | 13072 | 0 | 0 | 0 | 0 | 0 | 0 |
| M00001455D:F09 | 9283 | 0 | 0 | 0 | 0 | 0 | 0 |
| M00001455D:F09 | 9283 | 0 | 0 | 0 | 0 | 0 | 0 |
| M00001460A:F06 | 2448 | 0 | 0 | 0 | 0 | 0 | 0 |
| M00001460A:F12 | 39498 | 0 | 0 | 0 | 0 | 0 | 0 |
| M00001461A:D06 | 1531 | 0 | 0 | 0 | 0 | 0 | 0 |
| M00001463C:B11 | 19 | 2 | 13 | 13 | 0 | 69 | 10 |
| M00001465A:B11 | 10145 | 0 | 0 | 0 | 0 | 0 | 0 |
| M00001466A:E07 | 4275 | 0 | 0 | 0 | 0 | 0 | 0 |
| M00001467A:B07 | 38759 | 0 | 0 | 0 | 0 | 0 | 0 |
| M00001467A:D04 | 39508 | 0 | 0 | 0 | 0 | 0 | 0 |
| M00001467A:D08 | 16283 | 0 | 0 | 0 | 0 | 0 | 0 |
| M00001467A:D08 | 16283 | 0 | 0 | 0 | 0 | 0 | 0 |
| M00001467A:E10 | 39442 | 0 | 0 | 0 | 0 | 0 | 0 |
| M00001468A:F05 | 7589 | 0 | 0 | 0 | 0 | 0 | 0 |
| M00001469A:C10 | 12081 | 0 | 0 | 0 | 0 | 0 | 0 |
| M00001469A:H12 | 19105 | 0 | 0 | 0 | 0 | 0 | 0 |
| M00001470A:B10 | 1037 | 0 | 0 | 0 | 0 | 0 | 0 |
| M00001470A:C04 | 39425 | 0 | 0 | 0 | 0 | 0 | 0 |
| M00001471A:B01 | 39478 | 0 | 0 | 0 | 0 | 0 | 0 |
| M00001481D:A05 | 7985 | 0 | 0 | 0 | 0 | 0 | 0 |
| M00001490B:C04 | 18699 | 0 | 0 | 0 | 0 | 0 | 0 |
| M00001494D:F06 | 7206 | 0 | 0 | 0 | 0 | 0 | 0 |
| M00001497A:G02 | 2623 | 0 | 0 | 0 | 0 | 0 | 0 |
| M00001499B:A11 | 10539 | 0 | 0 | 0 | 0 | 0 | 0 |
| M00001500A:C05 | 5336 | 0 | 0 | 0 | 0 | 0 | 0 |
| M00001500A:E11 | 2623 | 0 | 0 | 0 | 0 | 0 | 0 |
| M00001500C:E04 | 9443 | 0 | 0 | 0 | 0 | 0 | 0 |
| M00001501D:C02 | 9685 | 0 | 0 | 0 | 0 | 0 | 0 |
| M00001504C:A07 | 10185 | 0 | 0 | 0 | 0 | 0 | 0 |
| M00001504C:H06 | 6974 | 0 | 0 | 0 | 0 | 0 | 0 |
| M00001504D:G06 | 6420 | 0 | 0 | 0 | 0 | 0 | 0 |
| M00001507A:H05 | 39168 | 0 | 0 | 0 | 0 | 0 | 0 |
| M00001511A:H06 | 39412 | 0 | 0 | 0 | 0 | 0 | 0 |
| M00001512A:A09 | 39186 | 0 | 0 | 0 | 0 | 0 | 0 |
| M00001512D:G09 | 3956 | 0 | 0 | 1 | 0 | 0 | 0 |
| M00001513A:B06 | 4568 | 0 | 0 | 0 | 0 | 0 | 0 |
| M00001513C:E08 | 14364 | 0 | 0 | 0 | 0 | 0 | 0 |
| M00001514C:D11 | 40044 | 0 | 1 | 0 | 0 | 0 | 0 |
| M00001517A:B07 | 4313 | 0 | 0 | 0 | 0 | 0 | 0 |
| M00001518C:B11 | 8952 | 0 | 0 | 0 | 0 | 0 | 0 |
| M00001528A:C04 | 7337 | 0 | 0 | 0 | 0 | 0 | 0 |
| M00001528A:F09 | 18957 | 0 | 0 | 0 | 0 | 0 | 0 |
| M00001528B:H04 | 8358 | 0 | 0 | 0 | 0 | 0 | 0 |
| M00001531A:D01 | 38085 | 0 | 0 | 0 | 0 | 0 | 0 |
| M00001532B:A06 | 3990 | 1 | 1 | 0 | 0 | 0 | 0 |
| M00001533A:C11 | 2428 | 0 | 0 | 1 | 0 | 0 | 0 |
| M00001534A:C04 | 16921 | 0 | 0 | 0 | 0 | 0 | 0 |
| M00001534A:D09 | 5097 | 0 | 0 | 0 | 0 | 0 | 0 |
| M00001534A:F09 | 5321 | 0 | 1 | 0 | 0 | 2 | 0 |
| M00001534C:A01 | 4119 | 0 | 0 | 0 | 0 | 0 | 0 |
| M00001535A:B01 | 7665 | 0 | 0 | 0 | 0 | 0 | 0 |
| M00001535A:C06 | 20212 | 0 | 0 | 0 | 0 | 0 | 0 |
| M00001535A:F10 | 39423 | 0 | 0 | 0 | 0 | 0 | 0 |
| M00001536A:B07 | 2696 | 0 | 0 | 0 | 0 | 3 | 0 |
| M00001536A:C08 | 39392 | 0 | 0 | 0 | 0 | 0 | 0 |
| M00001537A:F12 | 39420 | 0 | 0 | 0 | 0 | 0 | 0 |
| M00001537B:G07 | 3389 | 0 | 0 | 0 | 0 | 0 | 0 |
| M00001540A:D06 | 8286 | 0 | 0 | 0 | 0 | 0 | 0 |
| M00001541A:D02 | 3765 | 0 | 0 | 0 | 0 | 0 | 0 |
| M00001541A:F07 | 22085 | 0 | 0 | 0 | 0 | 0 | 0 |
| M00001541A:H03 | 39174 | 0 | 0 | 0 | 0 | 0 | 0 |
| M00001542A:A09 | 22113 | 0 | 0 | 0 | 0 | 0 | 0 |
| M00001542A:E06 | 39453 | 0 | 0 | 0 | 0 | 0 | 0 |
| M00001544A:E03 | 12170 | 0 | 0 | 0 | 0 | 0 | 0 |
| M00001544A:G02 | 19829 | 0 | 0 | 0 | 0 | 0 | 0 |
| M00001544B:B07 | 6974 | 0 | 0 | 0 | 0 | 0 | 0 |
| M00001545A:C03 | 19255 | 0 | 0 | 0 | 0 | 0 | 0 |
| M00001545A:D08 | 13864 | 0 | 0 | 0 | 0 | 0 | 0 |
| M00001546A:G11 | 1267 | 1 | 0 | 0 | 0 | 7 | 0 |
| M00001548A:E10 | 5892 | 0 | 0 | 0 | 0 | 0 | 0 |
| M00001548A:H09 | 1058 | 0 | 0 | 1 | 0 | 0 | 0 |
| M00001549A:B02 | 4015 | 0 | 0 | 0 | 0 | 0 | 0 |
| M00001549A:D08 | 10944 | 0 | 0 | 0 | 0 | 0 | 0 |
| M00001549B:F06 | 4193 | 0 | 0 | 0 | 0 | 0 | 0 |
| M00001549C:E06 | 16347 | 0 | 0 | 0 | 0 | 0 | 0 |
| M00001550A:A03 | 7239 | 0 | 0 | 0 | 0 | 0 | 0 |
| M00001550A:G01 | 5175 | 0 | 0 | 0 | 0 | 0 | 0 |
| M00001551A:B10 | 6268 | 0 | 0 | 0 | 0 | 0 | 0 |
| M00001551A:F05 | 39180 | 0 | 0 | 0 | 0 | 0 | 0 |
| M00001551A:G06 | 22390 | 0 | 0 | 0 | 0 | 0 | 0 |
| M00001551C:G09 | 3266 | 0 | 0 | 1 | 0 | 0 | 0 |
| M00001552A:B12 | 307 | 0 | 0 | 0 | 0 | 3 | 0 |
| M00001552A:D11 | 39458 | 0 | 0 | 0 | 0 | 0 | 0 |
| M00001552B:D04 | 5708 | 0 | 1 | 0 | 0 | 0 | 0 |
| M00001553A:H06 | 8298 | 0 | 0 | 0 | 0 | 0 | 0 |
| M00001553B:F12 | 4573 | 0 | 0 | 0 | 0 | 0 | 0 |
| M00001553D:D10 | 22814 | 0 | 0 | 0 | 0 | 0 | 0 |
| M00001555A:B02 | 39539 | 0 | 0 | 0 | 0 | 0 | 0 |
| M00001555A:C01 | 39195 | 0 | 0 | 0 | 0 | 0 | 0 |
| M00001555D:G10 | 4561 | 0 | 0 | 0 | 0 | 0 | 0 |
| M00001556A:C09 | 9244 | 0 | 0 | 0 | 0 | 0 | 0 |
| M00001556A:F11 | 1577 | 0 | 0 | 0 | 0 | 0 | 0 |
| M00001556A:H01 | 15855 | 3 | 5 | 5 | 0 | 3 | 1 |
| M00001556B:C08 | 4386 | 1 | 2 | 0 | 0 | 0 | 0 |
| M00001556B:G02 | 11294 | 0 | 0 | 0 | 0 | 0 | 0 |
| M00001557A:D02 | 7065 | 0 | 0 | 0 | 0 | 0 | 0 |
| M00001557A:D02 | 7065 | 0 | 0 | 0 | 0 | 0 | 0 |
| M00001557A:F01 | 9635 | 0 | 0 | 0 | 0 | 0 | 0 |
| M00001557A:F03 | 39490 | 0 | 0 | 0 | 0 | 0 | 0 |
| M00001557B:H10 | 5192 | 0 | 0 | 0 | 0 | 0 | 0 |
| M00001557D:D09 | 8761 | 0 | 0 | 0 | 0 | 0 | 0 |
| M00001558B:H11 | 7514 | 0 | 0 | 0 | 0 | 0 | 0 |
| M00001560D:F10 | 6558 | 0 | 0 | 0 | 0 | 0 | 0 |
| M00001561A:C05 | 39486 | 0 | 0 | 0 | 0 | 0 | 0 |
| M00001563B:F06 | 102 | 22 | 38 | 65 | 7 | 43 | 10 |
| M00001564A:B12 | 5053 | 0 | 0 | 1 | 0 | 0 | 0 |
| M00001571C:H06 | 5749 | 0 | 0 | 0 | 0 | 0 | 0 |
| M00001578B:E04 | 23001 | 0 | 0 | 0 | 0 | 0 | 0 |
| M00001579D:C03 | 6539 | 0 | 0 | 0 | 0 | 0 | 0 |
| M00001583D:A10 | 6293 | 0 | 0 | 0 | 0 | 0 | 0 |
| M00001586C:C05 | 4623 | 0 | 0 | 0 | 0 | 1 | 0 |
| M00001587A:B11 | 39380 | 0 | 0 | 0 | 0 | 0 | 0 |
| M00001594B:H04 | 260 | 0 | 0 | 0 | 0 | 1 | 0 |
| M00001597C:H02 | 4837 | 0 | 0 | 0 | 0 | 0 | 0 |
| M00001597D:C05 | 10470 | 0 | 0 | 0 | 0 | 0 | 0 |
| M00001598A:G03 | 16999 | 1 | 1 | 1 | 0 | 0 | 0 |
| M00001601A:D08 | 22794 | 0 | 0 | 0 | 0 | 0 | 0 |
| M00001604A:B10 | 1399 | 0 | 0 | 0 | 0 | 0 | 0 |
| M00001604A:F05 | 39391 | 0 | 0 | 0 | 0 | 0 | 0 |
| M00001607A:E11 | 11465 | 0 | 0 | 0 | 0 | 0 | 0 |
| M00001608A:B03 | 7802 | 0 | 0 | 0 | 0 | 0 | 0 |
| M00001608B:E03 | 22155 | 0 | 0 | 0 | 0 | 0 | 0 |
| M00001614C:F10 | 13157 | 0 | 0 | 0 | 0 | 0 | 0 |
| M00001617C:E02 | 17004 | 0 | 0 | 0 | 0 | 1 | 0 |
| M00001619C:F12 | 40314 | 0 | 0 | 0 | 0 | 0 | 0 |
| M00001621C:C08 | 40044 | 0 | 1 | 0 | 0 | 0 | 0 |
| M00001623D:F10 | 13913 | 0 | 0 | 0 | 0 | 0 | 0 |
| M00001624A:B06 | 3277 | 0 | 0 | 0 | 0 | 0 | 0 |
| M00001624C:F01 | 4309 | 0 | 0 | 0 | 0 | 0 | 0 |
| M00001630B:H09 | 5214 | 1 | 0 | 0 | 1 | 1 | 0 |
| M00001644C:B07 | 39171 | 0 | 0 | 0 | 0 | 0 | 0 |
| M00001645A:C12 | 19267 | 0 | 0 | 0 | 0 | 1 | 0 |
| M00001648C:A01 | 4665 | 0 | 0 | 0 | 0 | 0 | 0 |
| M00001657D:C03 | 23201 | 0 | 0 | 0 | 0 | 0 | 0 |
| M00001657D:F08 | 76760 | 0 | 0 | 0 | 0 | 0 | 0 |
| M00001662C:A09 | 23218 | 0 | 0 | 0 | 0 | 0 | 0 |
| M00001663A:E04 | 35702 | 0 | 0 | 0 | 0 | 0 | 0 |
| M00001669B:F02 | 6468 | 0 | 0 | 0 | 0 | 0 | 0 |
| M00001670C:H02 | 14367 | 0 | 0 | 0 | 0 | 0 | 0 |
| M00001673C:H02 | 7015 | 0 | 0 | 0 | 0 | 0 | 0 |
| M00001675A:C09 | 8773 | 0 | 0 | 0 | 0 | 0 | 0 |
| M00001676B:F05 | 11460 | 0 | 0 | 0 | 0 | 0 | 0 |
| M00001677C:E10 | 14627 | 0 | 1 | 0 | 0 | 0 | 0 |
| M00001677D:A07 | 7570 | 0 | 0 | 0 | 0 | 0 | 0 |
| M00001678D:F12 | 4416 | 0 | 0 | 0 | 0 | 0 | 0 |
| M00001679A:A06 | 6660 | 0 | 0 | 0 | 0 | 0 | 0 |
| M00001679A:F10 | 26875 | 0 | 0 | 0 | 0 | 0 | 0 |
| M00001679B:F01 | 6298 | 0 | 0 | 0 | 0 | 0 | 0 |
| M00001679C:F01 | 78091 | 0 | 0 | 0 | 0 | 0 | 0 |
| M00001679D:D03 | 10751 | 0 | 0 | 0 | 0 | 0 | 0 |
| M00001679D:D03 | 10751 | 0 | 0 | 0 | 0 | 0 | 0 |
| M00001680D:F08 | 10539 | 0 | 0 | 0 | 0 | 0 | 0 |
| M00001682C:B12 | 17055 | 0 | 0 | 0 | 0 | 0 | 0 |
| M00001686A:E06 | 4622 | 0 | 0 | 0 | 0 | 0 | 0 |
| M00001688C:F09 | 5382 | 0 | 0 | 0 | 0 | 0 | 0 |
| M00001693C:G01 | 4393 | 0 | 0 | 0 | 0 | 0 | 0 |
| M00001716D:H05 | 67252 | 0 | 0 | 0 | 0 | 0 | 0 |
| M00003741D:C09 | 40108 | 0 | 0 | 0 | 0 | 0 | 0 |
| M00003747D:C05 | 11476 | 0 | 0 | 0 | 0 | 0 | 0 |
| M00003759B:B09 | 697 | 0 | 0 | 0 | 0 | 1 | 0 |
| M00003762C:B08 | 17076 | 0 | 0 | 0 | 0 | 0 | 0 |
| M00003763A:F06 | 3108 | 0 | 0 | 0 | 0 | 0 | 0 |
| M00003774C:A03 | 67907 | 0 | 0 | 0 | 0 | 0 | 0 |
| M00003796C:D05 | 5619 | 0 | 0 | 0 | 0 | 0 | 0 |
| M00003826B:A06 | 11350 | 0 | 0 | 0 | 0 | 0 | 0 |
| M00003833A:E05 | 21877 | 0 | 0 | 0 | 0 | 0 | 0 |
| M00003837D:A01 | 7899 | 0 | 0 | 0 | 0 | 0 | 0 |
| M00003839A:D08 | 7798 | 0 | 0 | 0 | 0 | 0 | 0 |
| M00003844C:B11 | 6539 | 0 | 0 | 0 | 0 | 0 | 0 |
| M00003846B:D06 | 6874 | 0 | 0 | 1 | 0 | 0 | 0 |
| M00003851B:D10 | 13595 | 0 | 0 | 0 | 0 | 0 | 0 |
| M00003853A:D04 | 5619 | 0 | 0 | 0 | 0 | 0 | 0 |
| M00003853A:F12 | 10515 | 0 | 0 | 0 | 0 | 0 | 0 |
| M00003856B:C02 | 4622 | 0 | 0 | 0 | 0 | 0 | 0 |
| M00003857A:G10 | 3389 | 0 | 0 | 0 | 0 | 0 | 0 |
| M00003857A:H03 | 4718 | 0 | 0 | 0 | 0 | 0 | 0 |
| M00003871C:E02 | 4573 | 0 | 0 | 0 | 0 | 0 | 0 |
| M00003875B:F04 | 12977 | 0 | 0 | 0 | 0 | 0 | 0 |
| M00003875B:F04 | 12977 | 0 | 0 | 0 | 0 | 0 | 0 |
| M00003875C:G07 | 8479 | 0 | 0 | 0 | 0 | 0 | 1 |
| M00003876D:E12 | 7798 | 0 | 0 | 0 | 0 | 0 | 0 |
| M00003879B:C11 | 5345 | 0 | 0 | 0 | 2 | 0 | 1 |
| M00003879B:D10 | 31587 | 0 | 0 | 0 | 0 | 0 | 0 |
| M00003879D:A02 | 14507 | 0 | 0 | 0 | 0 | 0 | 0 |
| M00003885C:A02 | 13576 | 0 | 0 | 0 | 0 | 0 | 0 |
| M00003885C:A02 | 13576 | 0 | 0 | 0 | 0 | 0 | 0 |
| M00003906C:E10 | 9285 | 0 | 0 | 0 | 0 | 0 | 0 |
| M00003907D:A09 | 39809 | 0 | 0 | 0 | 0 | 0 | 0 |
| M00003907D:H04 | 16317 | 0 | 0 | 0 | 0 | 0 | 0 |
| M00003909D:C03 | 8672 | 0 | 0 | 0 | 0 | 0 | 0 |
| M00003912B:D01 | 12532 | 0 | 0 | 0 | 0 | 0 | 0 |
| M00003914C:F05 | 3900 | 0 | 0 | 0 | 0 | 1 | 0 |
| M00003922A:E06 | 23255 | 0 | 0 | 0 | 0 | 0 | 0 |
| M00003958A:H02 | 18957 | 0 | 0 | 0 | 0 | 0 | 0 |
| M00003958A:H02 | 18957 | 0 | 0 | 0 | 0 | 0 | 0 |
| M00003958C:G10 | 40455 | 0 | 0 | 0 | 0 | 0 | 0 |
| M00003958C:G10 | 40455 | 0 | 0 | 0 | 0 | 0 | 0 |
| M00003968B:F06 | 24488 | 0 | 0 | 0 | 0 | 0 | 0 |
| M00003970C:B09 | 40122 | 0 | 0 | 0 | 0 | 0 | 0 |
| M00003974D:E07 | 23210 | 0 | 0 | 0 | 0 | 0 | 0 |
| M00003974D:H02 | 23358 | 0 | 0 | 0 | 0 | 0 | 0 |
| M00003975A:G11 | 12439 | 0 | 0 | 0 | 0 | 0 | 0 |
| M00003978B:G05 | 5693 | 0 | 0 | 0 | 0 | 0 | 0 |
| M00003981A:E10 | 3430 | 0 | 0 | 0 | 0 | 1 | 0 |
| M00003982C:C02 | 2433 | 0 | 0 | 0 | 0 | 0 | 0 |
| M00003983A:A05 | 9105 | 0 | 0 | 0 | 0 | 0 | 0 |
| M00004028D:A06 | 6124 | 0 | 0 | 0 | 0 | 0 | 0 |
| M00004028D:C05 | 40073 | 0 | 0 | 0 | 0 | 0 | 0 |
| M00004031A:A12 | 9061 | 0 | 0 | 0 | 0 | 0 | 0 |
| M00004031A:A12 | 9061 | 0 | 0 | 0 | 0 | 0 | 0 |
| M00004035C:A07 | 37285 | 0 | 0 | 0 | 0 | 0 | 0 |
| M00004035D:B06 | 17036 | 0 | 0 | 0 | 0 | 0 | 0 |
| M00004059A:D06 | 5417 | 0 | 0 | 0 | 0 | 0 | 0 |
| M00004068B:A01 | 3706 | 0 | 0 | 0 | 0 | 0 | 0 |
| M00004072B:B05 | 17036 | 0 | 0 | 0 | 0 | 0 | 0 |
| M00004081C:D10 | 15069 | 0 | 0 | 0 | 0 | 0 | 0 |
| M00004081C:D12 | 14391 | 0 | 0 | 0 | 0 | 0 | 0 |
| M00004086D:G06 | 9285 | 0 | 0 | 0 | 0 | 0 | 0 |
| M00004087D:A01 | 6880 | 0 | 0 | 0 | 0 | 0 | 0 |
| M00004093D:B12 | 5325 | 1 | 1 | 0 | 1 | 0 | 1 |
| M00004093D:B12 | 5325 | 1 | 1 | 0 | 1 | 0 | 1 |
| M00004105C:A04 | 7221 | 0 | 0 | 0 | 0 | 0 | 0 |
| M00004108A:E06 | 4937 | 0 | 0 | 0 | 0 | 0 | 0 |
| M00004111D:A08 | 6874 | 0 | 0 | 1 | 0 | 0 | 0 |
| M00004114C:F11 | 13183 | 0 | 0 | 0 | 0 | 0 | 0 |
| M00004138B:H02 | 13272 | 0 | 0 | 0 | 0 | 0 | 0 |
| M00004146C:C11 | 5257 | 0 | 1 | 0 | 0 | 0 | 0 |
| M00004151D:B08 | 16977 | 0 | 0 | 0 | 0 | 0 | 0 |
| M00004157C:A09 | 6455 | 0 | 0 | 0 | 0 | 0 | 0 |
| M00004169C:C12 | 5319 | 0 | 0 | 0 | 0 | 0 | 0 |
| M00004171D:B03 | 4908 | 0 | 0 | 0 | 0 | 0 | 0 |
| M00004172C:D08 | 11494 | 0 | 0 | 0 | 0 | 0 | 0 |
| M00004183C:D07 | 16392 | 0 | 0 | 0 | 0 | 0 | 0 |
| M00004185C:C03 | 11443 | 0 | 0 | 0 | 0 | 0 | 0 |
| M00004197D:H01 | 8210 | 0 | 0 | 0 | 0 | 0 | 0 |
| M00004203B:C12 | 14311 | 0 | 0 | 0 | 0 | 0 | 0 |
| M00004212B:C07 | 2379 | 0 | 0 | 0 | 0 | 0 | 0 |
| M00004214C:H05 | 11451 | 0 | 0 | 0 | 0 | 0 | 0 |
| M00004223A:G10 | 16918 | 0 | 0 | 0 | 0 | 0 | 0 |
| M00004223B:D09 | 7899 | 0 | 0 | 0 | 0 | 0 | 0 |
| M00004223D:E04 | 12971 | 0 | 0 | 0 | 0 | 0 | 0 |
| M00004229B:F08 | 6455 | 0 | 0 | 0 | 0 | 0 | 0 |
| M00004230B:C07 | 7212 | 0 | 0 | 0 | 0 | 0 | 0 |
| M00004269D:D06 | 4905 | 0 | 0 | 0 | 0 | 0 | 0 |
| M00004275C:C11 | 16914 | 0 | 0 | 0 | 0 | 0 | 0 |
| M00004283B:A04 | 14286 | 0 | 0 | 0 | 0 | 0 | 0 |
| M00004285B:E08 | 56020 | 0 | 0 | 0 | 0 | 0 | 0 |
| M00004295D:F12 | 16921 | 0 | 0 | 0 | 0 | 0 | 0 |
| M00004296C:H07 | 13046 | 0 | 0 | 0 | 0 | 0 | 0 |
| M00004307C:A06 | 9457 | 0 | 0 | 0 | 0 | 0 | 0 |
| M00004312A:G03 | 26295 | 0 | 0 | 0 | 0 | 0 | 0 |
| M00004318C:D10 | 21847 | 0 | 0 | 0 | 0 | 0 | 0 |
| M00004372A:A03 | 2030 | 0 | 0 | 0 | 0 | 0 | 0 |
| M00004377C:F05 | 2102 | 0 | 0 | 0 | 0 | 0 | 0 |

[0484] TABLE 7
All Differential Data for Libs 12-14

| | | Clones in | Clones in | Clones in |
|---|---|---|---|---|
| Clone Name | Cluster ID | Lib12 | Lib13 | Lib14 |
| M00001340B:A06 | 17062 | 0 | 0 | 0 |
| M00001340D:F10 | 11589 | 0 | 0 | 0 |
| M00001341A:E12 | 4443 | 4 | 2 | 0 |
| M00001342B:E06 | 39805 | 0 | 0 | 0 |
| M00001343C:F10 | 2790 | 0 | 0 | 0 |
| M00001343D:H07 | 23255 | 0 | 0 | 0 |
| M00001345A:E01 | 6420 | 0 | 0 | 0 |
| M00001346A:F09 | 5007 | 0 | 0 | 0 |
| M00001346D:E03 | 6806 | 0 | 1 | 1 |
| M00001346D:G06 | 5779 | 0 | 0 | 0 |
| M00001346D:G06 | 5779 | 0 | 0 | 0 |
| M00001347A:B10 | 13576 | 0 | 0 | 0 |
| M00001348B:B04 | 16927 | 0 | 0 | 0 |
| M00001348B:G06 | 16985 | 0 | 0 | 0 |
| M00001349B:B08 | 3584 | 0 | 0 | 0 |
| M00001350A:H01 | 7187 | 0 | 0 | 0 |
| M00001351B:A08 | 3162 | 0 | 0 | 1 |
| M00001351B:A08 | 3162 | 0 | 0 | 1 |
| M00001352A:E02 | 16245 | 0 | 0 | 0 |
| M00001353A:G12 | 8078 | 0 | 0 | 0 |
| M00001353D:D10 | 14929 | 0 | 1 | 0 |
| M00001355B:G10 | 14391 | 0 | 0 | 0 |
| M00001357D:D11 | 4059 | 0 | 0 | 0 |
| M00001361A:A05 | 4141 | 1 | 2 | 1 |
| M00001361D:F08 | 2379 | 0 | 0 | 0 |
| M00001362B:D10 | 5622 | 0 | 2 | 1 |
| M00001362C:H11 | 945 | 0 | 0 | 0 |
| M00001365C:C10 | 40132 | 0 | 0 | 0 |
| M00001370A:C09 | 6867 | 0 | 0 | 0 |
| M00001371C:E09 | 7172 | 0 | 0 | 1 |
| M00001376B:G06 | 17732 | 2 | 0 | 0 |
| M00001378B:B02 | 39833 | 0 | 0 | 0 |
| M00001379A:A05 | 1334 | 0 | 0 | 0 |
| M00001380D:B09 | 39886 | 0 | 0 | 0 |
| M00001382C:A02 | 22979 | 1 | 0 | 0 |
| M00001383A:C03 | 39648 | 0 | 0 | 0 |
| M00001383A:C03 | 39648 | 0 | 0 | 0 |
| M00001386C:B12 | 5178 | 0 | 0 | 0 |
| M00001387A:C05 | 2464 | 0 | 0 | 0 |
| M00001387B:G03 | 7587 | 0 | 0 | 0 |
| M00001388D:G05 | 5832 | 0 | 0 | 0 |
| M00001389A:C08 | 16269 | 2 | 0 | 0 |
| M00001394A:F01 | 6583 | 0 | 0 | 0 |
| M00001395A:C03 | 4016 | 0 | 0 | 0 |
| M00001396A:C03 | 4009 | 2 | 0 | 0 |
| M00001402A:E08 | 39563 | 0 | 0 | 0 |
| M00001407B:D11 | 5556 | 0 | 0 | 0 |
| M00001409C:D12 | 9577 | 0 | 0 | 0 |
| M00001410A:D07 | 7005 | 0 | 0 | 0 |
| M00001412B:B10 | 8551 | 0 | 0 | 0 |
| M00001415A:H06 | 13538 | 0 | 0 | 0 |
| M00001416A:H01 | 7674 | 0 | 0 | 0 |
| M00001416B:H11 | 8847 | 1 | 0 | 0 |
| M00001417A:E02 | 36393 | 0 | 0 | 0 |
| M00001418B:F03 | 9952 | 0 | 0 | 0 |
| M00001418D:B06 | 8526 | 0 | 0 | 0 |
| M00001421C:F01 | 9577 | 0 | 0 | 0 |
| M00001423B:E07 | 15066 | 0 | 0 | 0 |
| M00001424B:G09 | 10470 | 0 | 0 | 0 |
| M00001425B:H08 | 22195 | 0 | 0 | 0 |
| M00001426D:C08 | 4261 | 0 | 0 | 0 |
| M00001428A:H10 | 84182 | 0 | 0 | 0 |
| M00001429A:H04 | 2797 | 0 | 0 | 0 |
| M00001429B:A11 | 4635 | 0 | 0 | 0 |
| M00001429D:D07 | 40392 | 0 | 0 | 0 |
| M00001439C:F08 | 40054 | 0 | 0 | 0 |
| M00001442C:D07 | 16731 | 0 | 0 | 0 |
| M00001445A:F05 | 13532 | 0 | 0 | 0 |
| M00001446A:F05 | 7801 | 0 | 1 | 0 |
| M00001447A:G03 | 10717 | 0 | 0 | 0 |
| M00001448D:C09 | 8 | 7 | 6 | 9 |
| M00001448D:H01 | 36313 | 1 | 0 | 0 |
| M00001449A:A12 | 5857 | 0 | 0 | 0 |
| M00001449A:B12 | 41633 | 0 | 0 | 0 |
| M00001449A:D12 | 3681 | 1 | 0 | 0 |
| M00001449A:G10 | 36535 | 0 | 0 | 0 |
| M00001449C:D06 | 86110 | 0 | 0 | 0 |
| M00001450A:A02 | 39304 | 0 | 1 | 0 |
| M00001450A:A11 | 32663 | 0 | 0 | 0 |
| M00001450A:B12 | 82498 | 0 | 0 | 0 |
| M00001450A:D08 | 27250 | 0 | 0 | 0 |
| M00001452A:B04 | 84328 | 0 | 0 | 0 |
| M00001452A:B12 | 86859 | 0 | 0 | 0 |
| M00001452A:D08 | 1120 | 0 | 0 | 0 |
| M00001452A:F05 | 85064 | 0 | 0 | 0 |
| M00001452C:B06 | 16970 | 1 | 0 | 0 |
| M00001453A:E11 | 16130 | 0 | 0 | 0 |
| M00001453C:F06 | 16653 | 0 | 0 | 0 |
| M00001454A:A09 | 83103 | 0 | 0 | 0 |
| M00001454B:C12 | 7005 | 0 | 0 | 0 |
| M00001454D:G03 | 689 | 0 | 0 | 1 |
| M00001455A:E09 | 13238 | 0 | 0 | 0 |
| M00001455B:E12 | 13072 | 0 | 0 | 0 |
| M00001455D:F09 | 9283 | 0 | 0 | 0 |
| M00001455D:F09 | 9283 | 0 | 0 | 0 |
| M00001460A:F06 | 2448 | 0 | 0 | 0 |
| M00001460A:F12 | 39498 | 0 | 0 | 0 |
| M00001461A:D06 | 1531 | 0 | 0 | 1 |
| M00001463C:B11 | 19 | 17 | 32 | 31 |
| M00001465A:B11 | 10145 | 0 | 0 | 0 |
| M00001466A:E07 | 4275 | 0 | 0 | 0 |
| M00001467A:B07 | 38759 | 0 | 0 | 0 |
| M00001467A:D04 | 39508 | 0 | 0 | 0 |
| M00001467A:D08 | 16283 | 0 | 0 | 0 |
| M00001467A:D08 | 16283 | 0 | 0 | 0 |
| M00001467A:E10 | 39442 | 0 | 0 | 0 |
| M00001468A:F05 | 7589 | 0 | 0 | 0 |
| M00001469A:C10 | 12081 | 0 | 0 | 0 |
| M00001469A:H12 | 19105 | 0 | 0 | 0 |
| M00001470A:B10 | 1037 | 0 | 0 | 0 |
| M00001470A:C04 | 39425 | 0 | 0 | 0 |
| M00001471A:B01 | 39478 | 0 | 0 | 0 |
| M00001481D:A05 | 7985 | 0 | 0 | 0 |
| M00001490B:C04 | 18699 | 0 | 0 | 0 |
| M00001494D:F06 | 7206 | 0 | 0 | 0 |
| M00001497A:G02 | 2623 | 1 | 0 | 0 |
| M00001499B:A11 | 10539 | 0 | 1 | 0 |
| M00001500A:C05 | 5336 | 0 | 0 | 0 |
| M00001500A:E11 | 2623 | 1 | 0 | 0 |
| M00001500C:E04 | 9443 | 0 | 0 | 0 |
| M00001501D:C02 | 9685 | 0 | 0 | 0 |
| M00001504C:A07 | 10185 | 0 | 0 | 0 |
| M00001504C:H06 | 6974 | 0 | 0 | 0 |
| M00001504D:G06 | 6420 | 0 | 0 | 0 |
| M00001507A:H05 | 39168 | 0 | 0 | 0 |
| M00001511A:H06 | 39412 | 0 | 0 | 0 |
| M00001512A:A09 | 39186 | 0 | 0 | 0 |
| M00001512D:G09 | 3956 | 0 | 0 | 0 |
| M00001513A:B06 | 4568 | 0 | 0 | 0 |
| M00001513C:E08 | 14364 | 0 | 0 | 0 |
| M00001514C:D11 | 40044 | 0 | 0 | 0 |
| M00001517A:B07 | 4313 | 0 | 0 | 0 |
| M00001518C:B11 | 8952 | 0 | 0 | 0 |
| M00001528A:C04 | 7337 | 1 | 2 | 2 |
| M00001528A:F09 | 18957 | 0 | 0 | 0 |
| M00001528B:H04 | 8358 | 0 | 0 | 0 |
| M00001531A:D01 | 38085 | 0 | 0 | 0 |
| M00001532B:A06 | 3990 | 0 | 0 | 0 |
| M00001533A:C11 | 2428 | 0 | 0 | 0 |
| M00001534A:C04 | 16921 | 0 | 0 | 0 |
| M00001534A:D09 | 5097 | 0 | 0 | 0 |
| M00001534A:F09 | 5321 | 4 | 7 | 6 |
| M00001534C:A01 | 4119 | 0 | 0 | 0 |
| M00001535A:B01 | 7665 | 0 | 2 | 4 |
| M00001535A:C06 | 20212 | 0 | 0 | 0 |
| M00001535A:F10 | 39423 | 0 | 0 | 0 |
| M00001536A:B07 | 2696 | 0 | 0 | 0 |
| M00001536A:C08 | 39392 | 0 | 0 | 0 |
| M00001537A:F12 | 39420 | 0 | 0 | 0 |
| M00001537B:G07 | 3389 | 0 | 0 | 0 |
| M00001540A:D06 | 8286 | 0 | 0 | 0 |
| M00001541A:D02 | 3765 | 0 | 0 | 0 |
| M00001541A:F07 | 22085 | 0 | 0 | 0 |
| M00001541A:H03 | 39174 | 0 | 0 | 0 |
| M00001542A:A09 | 22113 | 0 | 0 | 0 |
| M00001542A:E06 | 39453 | 0 | 0 | 0 |
| M00001544A:E03 | 12170 | 0 | 0 | 0 |
| M00001544A:G02 | 19829 | 0 | 0 | 0 |
| M00001544B:B07 | 6974 | 0 | 0 | 0 |
| M00001545A:C03 | 19255 | 0 | 0 | 0 |
| M00001545A:D08 | 13864 | 0 | 0 | 0 |
| M00001546A:G11 | 1267 | 0 | 0 | 0 |
| M00001548A:E10 | 5892 | 0 | 1 | 0 |
| M00001548A:H09 | 1058 | 1 | 3 | 0 |
| M00001549A:B02 | 4015 | 0 | 1 | 0 |
| M00001549A:D08 | 10944 | 1 | 0 | 0 |
| M00001549B:F06 | 4193 | 0 | 0 | 0 |
| M00001549C:E06 | 16347 | 0 | 0 | 0 |
| M00001550A:A03 | 7239 | 0 | 1 | 0 |
| M00001550A:G01 | 5175 | 1 | 0 | 0 |
| M00001551A:B10 | 6268 | 0 | 0 | 1 |
| M00001551A:F05 | 39180 | 0 | 0 | 0 |
| M00001551A:G06 | 22390 | 0 | 0 | 1 |
| M00001551C:G09 | 3266 | 0 | 0 | 0 |
| M00001552A:B12 | 307 | 6 | 11 | 4 |
| M00001552A:D11 | 39458 | 0 | 0 | 0 |
| M00001552B:D04 | 5708 | 0 | 0 | 0 |
| M00001553A:H06 | 8298 | 0 | 0 | 0 |
| M00001553B:F12 | 4573 | 0 | 0 | 0 |
| M00001553D:D10 | 22814 | 0 | 0 | 0 |
| M00001555A:B02 | 39539 | 0 | 0 | 0 |
| M00001555A:C01 | 39195 | 0 | 0 | 0 |
| M00001555D:G10 | 4561 | 0 | 0 | 0 |
| M00001556A:C09 | 9244 | 0 | 1 | 0 |
| M00001556A:F11 | 1577 | 0 | 0 | 2 |
| M00001556A:H01 | 15855 | 1 | 1 | 0 |
| M00001556B:C08 | 4386 | 3 | 0 | 1 |
| M00001556B:G02 | 11294 | 0 | 0 | 0 |
| M00001557A:D02 | 7065 | 0 | 0 | 0 |
| M00001557A:D02 | 7065 | 0 | 0 | 0 |
| M00001557A:F01 | 9635 | 0 | 0 | 0 |
| M00001557A:F03 | 39490 | 0 | 0 | 0 |
| M00001557B:H10 | 5192 | 0 | 0 | 0 |
| M00001557D:D09 | 8761 | 0 | 0 | 0 |
| M00001558B:H11 | 7514 | 0 | 0 | 0 |
| M00001560D:F10 | 6558 | 0 | 0 | 0 |
| M00001561A:C05 | 39486 | 0 | 0 | 0 |
| M00001563B:F06 | 102 | 2 | 1 | 2 |
| M00001564A:B12 | 5053 | 0 | 0 | 0 |
| M00001571C:H06 | 5749 | 0 | 0 | 0 |
| M00001578B:E04 | 23001 | 0 | 0 | 0 |
| M00001579D:C03 | 6539 | 0 | 0 | 0 |
| M00001583D:A10 | 6293 | 0 | 0 | 0 |
| M00001586C:C05 | 4623 | 0 | 0 | 0 |
| M00001587A:B11 | 39380 | 0 | 0 | 0 |
| M00001594B:H04 | 260 | 1 | 0 | 0 |
| M00001597C:H02 | 4837 | 1 | 0 | 0 |
| M00001597D:C05 | 10470 | 0 | 0 | 0 |
| M00001598A:G03 | 16999 | 4 | 2 | 6 |
| M00001601A:D08 | 22794 | 0 | 0 | 0 |
| M00001604A:B10 | 1399 | 6 | 3 | 3 |
| M00001604A:F05 | 39391 | 0 | 0 | 0 |
| M00001607A:E11 | 11465 | 0 | 0 | 0 |
| M00001608A:B03 | 7802 | 0 | 0 | 0 |
| M00001608B:E03 | 22155 | 0 | 0 | 0 |
| M00001614C:F10 | 13157 | 0 | 0 | 0 |
| M00001617C:E02 | 17004 | 0 | 0 | 0 |
| M00001619C:F12 | 40314 | 0 | 0 | 0 |
| M00001621C:C08 | 40044 | 0 | 0 | 0 |
| M00001623D:F10 | 13913 | 0 | 0 | 0 |
| M00001624A:B06 | 3277 | 0 | 0 | 0 |
| M00001624C:F01 | 4309 | 0 | 0 | 0 |
| M00001630B:H09 | 5214 | 0 | 1 | 2 |
| M00001644C:B07 | 39171 | 0 | 0 | 0 |
| M00001645A:C12 | 19267 | 0 | 0 | 0 |
| M00001648C:A01 | 4665 | 0 | 0 | 0 |
| M00001657D:C03 | 23201 | 0 | 0 | 0 |
| M00001657D:F08 | 76760 | 0 | 0 | 0 |
| M00001662C:A09 | 23218 | 0 | 0 | 0 |
| M00001663A:E04 | 35702 | 0 | 0 | 0 |
| M00001669B:F02 | 6468 | 0 | 0 | 0 |
| M00001670C:H02 | 14367 | 0 | 0 | 0 |
| M00001673C:H02 | 7015 | 0 | 0 | 0 |
| M00001675A:C09 | 8773 | 0 | 0 | 0 |
| M00001676B:F05 | 11460 | 2 | 0 | 0 |
| M00001677C:E10 | 14627 | 0 | 0 | 0 |
| M00001677D:A07 | 7570 | 0 | 0 | 0 |
| M00001678D:F12 | 4416 | 1 | 2 | 0 |
| M00001679A:A06 | 6660 | 0 | 0 | 0 |
| M00001679A:F10 | 26875 | 0 | 0 | 0 |
| M00001679B:F01 | 6298 | 0 | 0 | 0 |
| M00001679C:F01 | 78091 | 0 | 0 | 0 |
| M00001679D:D03 | 10751 | 0 | 0 | 0 |
| M00001679D:D03 | 10751 | 0 | 0 | 0 |
| M00001680D:F08 | 10539 | 0 | 1 | 0 |
| M00001682C:B12 | 17055 | 0 | 0 | 0 |
| M00001686A:E06 | 4622 | 0 | 0 | 0 |
| M00001688C:F09 | 5382 | 0 | 0 | 0 |
| M00001693C:G01 | 4393 | 0 | 0 | 0 |
| M00001716D:H05 | 67252 | 0 | 0 | 0 |
| M00003741D:C09 | 40108 | 0 | 0 | 0 |
| M00003747D:C05 | 11476 | 0 | 0 | 0 |
| M00003759B:B09 | 697 | 0 | 0 | 0 |
| M00003762C:B08 | 17076 | 0 | 0 | 0 |
| M00003763A:F06 | 3108 | 0 | 0 | 0 |
| M00003774C:A03 | 67907 | 0 | 0 | 0 |
| M00003796C:D05 | 5619 | 0 | 1 | 0 |
| M00003826B:A06 | 11350 | 0 | 0 | 0 |
| M00003833A:E05 | 21877 | 0 | 0 | 0 |
| M00003837D:A01 | 7899 | 0 | 0 | 0 |
| M00003839A:D08 | 7798 | 0 | 0 | 0 |
| M00003844C:B11 | 6539 | 0 | 0 | 0 |
| M00003846B:D06 | 6874 | 0 | 0 | 0 |
| M00003851B:D10 | 13595 | 0 | 0 | 0 |
| M00003853A:D04 | 5619 | 0 | 1 | 0 |
| M00003853A:F12 | 10515 | 0 | 0 | 1 |
| M00003856B:C02 | 4622 | 0 | 0 | 0 |
| M00003857A:G10 | 3389 | 0 | 0 | 0 |
| M00003857A:H03 | 4718 | 0 | 0 | 0 |
| M00003871C:E02 | 4573 | 0 | 0 | 0 |
| M00003875B:F04 | 12977 | 0 | 0 | 0 |
| M00003875B:F04 | 12977 | 0 | 0 | 0 |
| M00003875C:G07 | 8479 | 1 | 0 | 0 |
| M00003876D:E12 | 7798 | 0 | 0 | 0 |
| M00003879B:C11 | 5345 | 4 | 8 | 3 |
| M00003879B:D10 | 31587 | 0 | 0 | 0 |
| M00003879D:A02 | 14507 | 0 | 0 | 0 |
| M00003885C:A02 | 13576 | 0 | 0 | 0 |
| M00003885C:A02 | 13576 | 0 | 0 | 0 |
| M00003906C:E10 | 9285 | 0 | 0 | 0 |
| M00003907D:A09 | 39809 | 0 | 0 | 0 |
| M00003907D:H04 | 16317 | 0 | 0 | 0 |
| M00003909D:C03 | 8672 | 0 | 0 | 0 |
| M00003912B:D01 | 12532 | 0 | 0 | 0 |
| M00003914C:F05 | 3900 | 0 | 1 | 0 |
| M00003922A:E06 | 23255 | 0 | 0 | 0 |
| M00003958A:H02 | 18957 | 0 | 0 | 0 |
| M00003958A:H02 | 18957 | 0 | 0 | 0 |
| M00003958C:G10 | 40455 | 0 | 0 | 0 |
| M00003958C:G10 | 40455 | 0 | 0 | 0 |
| M00003968B:F06 | 24488 | 0 | 0 | 0 |
| M00003970C:B09 | 40122 | 0 | 0 | 0 |
| M00003974D:E07 | 23210 | 0 | 0 | 0 |
| M00003974D:H02 | 23358 | 0 | 0 | 0 |
| M00003975A:G11 | 12439 | 0 | 0 | 0 |
| M00003978B:G05 | 5693 | 0 | 0 | 0 |
| M00003981A:E10 | 3430 | 0 | 0 | 0 |
| M00003982C:C02 | 2433 | 2 | 4 | 0 |
| M00003983A:A05 | 9105 | 0 | 0 | 0 |
| M00004028D:A06 | 6124 | 0 | 0 | 0 |
| M00004028D:C05 | 40073 | 0 | 1 | 0 |
| M00004031A:A12 | 9061 | 0 | 0 | 0 |
| M00004031A:A12 | 9061 | 0 | 0 | 0 |
| M00004035C:A07 | 37285 | 0 | 0 | 0 |
| M00004035D:B06 | 17036 | 0 | 0 | 0 |
| M00004059A:D06 | 5417 | 0 | 0 | 0 |
| M00004068B:A01 | 3706 | 0 | 0 | 0 |
| M00004072B:B05 | 17036 | 0 | 0 | 0 |
| M00004081C:D10 | 15069 | 0 | 0 | 0 |
| M00004081C:D12 | 14391 | 0 | 0 | 0 |
| M00004086D:G06 | 9285 | 0 | 0 | 0 |
| M00004087D:A01 | 6880 | 0 | 0 | 0 |
| M00004093D:B12 | 5325 | 0 | 0 | 0 |
| M00004093D:B12 | 5325 | 0 | 0 | 0 |
| M00004105C:A04 | 7221 | 0 | 0 | 0 |
| M00004108A:E06 | 4937 | 0 | 0 | 0 |
| M00004111D:A08 | 6874 | 0 | 0 | 0 |
| M00004114C:F11 | 13183 | 0 | 0 | 0 |
| M00004138B:H02 | 13272 | 0 | 0 | 0 |
| M00004146C:C11 | 5257 | 0 | 0 | 1 |
| M00004151D:B08 | 16977 | 0 | 0 | 0 |
| M00004157C:A09 | 6455 | 0 | 0 | 0 |
| M00004169C:C12 | 5319 | 0 | 0 | 0 |
| M00004171D:B03 | 4908 | 0 | 0 | 0 |
| M00004172C:D08 | 11494 | 0 | 0 | 0 |
| M00004183C:D07 | 16392 | 0 | 0 | 0 |
| M00004185C:C03 | 11443 | 2 | 0 | 0 |
| M00004197D:H01 | 8210 | 0 | 0 | 0 |
| M00004203B:C12 | 14311 | 0 | 0 | 0 |
| M00004212B:C07 | 2379 | 0 | 0 | 0 |
| M00004214C:H05 | 11451 | 0 | 0 | 0 |
| M00004223A:G10 | 16918 | 0 | 0 | 0 |
| M00004223B:D09 | 7899 | 0 | 0 | 0 |
| M00004223D:E04 | 12971 | 0 | 0 | 0 |
| M00004229B:F08 | 6455 | 0 | 0 | 0 |
| M00004230B:C07 | 7212 | 0 | 0 | 1 |
| M00004269D:D06 | 4905 | 0 | 0 | 0 |
| M00004275G:C11 | 16914 | 0 | 0 | 0 |
| M00004283B:A04 | 14286 | 0 | 0 | 0 |
| M00004285B:E08 | 56020 | 0 | 0 | 0 |
| M00004295D:F12 | 16921 | 0 | 0 | 0 |
| M00004296C:H07 | 13046 | 0 | 0 | 0 |
| M00004307C:A06 | 9457 | 1 | 0 | 0 |
| M00004312A:G03 | 26295 | 0 | 0 | 0 |
| M00004318C:D10 | 21847 | 0 | 0 | 0 |
| M00004372A:A03 | 2030 | 0 | 0 | 0 |
| M00004377C:F05 | 2102 | 0 | 0 | 0 |

The application's sequence listing, which the Patent Office published only in electronic form, follows.

SEQUENCE LISTING (844 sequences)

SEQ ID NO: 1 - DNA, 300 bp, Homo sapiens
  misc_feature (1)...(300): n = A,T,C or G
tctcccctgagctgcaggcctgcatatccagtaggtctactggacatctgtactggttgttgnggaggaacctctggcttgctcattaagtcctactgattttcactatcccctgaatttccccacttatttttgtctttcactatcgcaggccttagaagaggtctacctgcctccagtcttacctagtccagtctaccccctggagttagaatggccatcctgaagtgaaaagtaatgtcacattactcccttcagtgatttcttgtagaagtgccaatccctgaatgccaccaagat

SEQ ID NO: 2 - DNA, 299 bp, Homo sapiens
  misc_feature (1)...(299): n = A,T,C or G
cccagctgctcaggaggctgaggcaggagaattgcttgaacccaagaggcggaggttgtggtgagccgagattgcacctttgtactccagcctgggcaacgagcaaaaaactctgtctcaaacaaaaagaagaaaaaaaaaaaaaaaannnnnnnnnnnnnnnnnnnnnnnnnttnttctggcgncnagtcccaaantcntaccttgtaagacctttanntnncctgnggtntttntnnacncttanatannnntntttnctatcaantatagggaganttttcntttnggggcaactt

SEQ ID NO: 3 - DNA, 300 bp, Homo sapiens
  misc_feature (1)...(300): n = A,T,C or G
atacgattcgaacnnggacaagacgagtatggaataatatcccactnnntttacaatactganattatgcngngatagngcttgttccattcnaccagcgaatnatgcattnacncnacacnngagttactatccaaacacacgttttcacgntacctgangctggtnganaattatgcgaccatgaggctttccangatntttctanntancagacngngnacaatgntgaanaagcngtacacaccgcnctngncnnccnncactgancangtnacnnngctcactgnngcctctttc

SEQ ID NO: 4 - DNA, 287 bp, Homo sapiens
  misc_feature (1)...(287): n = A,T,C or G
aaancngcacgangccacgtncgnnnngntnntactnnncnatngccncntcantggcngncagctagacgcctaacagccganganccanccntnntgtganccngtcntgacngnnagcntgccggtcttgctcnttttgtctaccnngagganannnntntgggacatcccagactgagtgaggagatctgcngctgcnnctgtacttggttacancncacacgangactntnccttggactananacactagcctaanattcngcactacctantcctctggc

SEQ ID NO: 5 - DNA, 300 bp, Homo sapiens
gtccttttgaaccaccccaaagaactcaacatggcaaagcaaatggtaaaagcttcccgactgttctactttgggtccgcgcgaagcccactcacgtgtgatctgtgttgcccctgggaggcccggggcgaccggaaaagggctctctcaagttctgaaaagagaatctgccaccagatcgaatttcgacccctgagcttgttcggacgtatggtccaaattcagattaaggtggtcacccaacccgagatgtcaggaaaggccttctgcagagaaaatgtccccccacccgccatctgc

SEQ ID NO: 6 - DNA, 284 bp, Homo sapiens
  misc_feature (1)...(284): n = A,T,C or G
tntcccctttgacgccttantgccctnncgctacnngtccnttaggccttatcccatcgnccntcgtttngcattctgccnnagantgactttncnatcatgcntnatnngtnnttacnaggggctngggtgaattnttacaccctgcnantccatancacantgccntgcnagctncaccctcntgaataaatgcaataaantttcngttgatcttatacaccttatgcnccntanttaatcagccctntnttacnanatcnanttatgcnggtattaaaaca

SEQ ID NO: 7 - DNA, 277 bp, Homo sapiens
  misc_feature (1)...(277): n = A,T,C or G
gtgctgcagacaacacaccttcctgatggaggtgtccggctgatggagaagtctgtgggcttgtaaatcatctttgatgttaaccaggccgacgctgtggccacattccgaaagattaaccctgtcaaaccctannnnnnnnnnnnnnnnnnnggatttgatnagcctgtnccanacctctgcagcctcnancggtngtnntaccatagtggggatgaccctctgatactttgncctggtngancatgntgacanntgcttctacagcttnngggac

SEQ ID NO: 8 - DNA, 292 bp, Homo sapiens
  misc_feature (1)...(292): n = A,T,C or G
cttgggaggctgagtcaggagaattgcttgagcccaggagatggaggttgcagtgagccaagatcatgccactgcactccagactgggcaacagagggagactccgtctcaaaaactaaaaaaaaaaatacatttagtatagcggggggtgggcgggagaaataatgttatttcctatgcaaatgacgnnnnnnnnnnnncccatggtaaatgtnaatatactgcgtctnttttggganagccttttantaaangagtcttanatgaatctctanntnatgantttaacttg

SEQ ID NO: 9 - DNA, 300 bp, Homo sapiens
ccaggttagctgctgaatcaaagcttcaaacagaagttaaagaaggaaaagaaacttcaagcaaattggaaaaagaaacttgtaagaaatcacaccctattctatatgtgtcttctaaatctactccagagacccagtgccctcaacagtaaagacttttctttaataagagtacggtgccacttgcctcaaaagttactatggtgcttaagattgtcttgatctgacatatatcaccttctgggttatttactcattgtgccaggacctggcattttcatgtgcctttgaccaagtgtt

SEQ ID NO: 10 - DNA, 300 bp, Homo sapiens
  misc_feature (1)...(300): n = A,T,C or G
aggaggcggagcttgcagtgagctgagatcgcgccactgcactccagcctgggcaacagagtgagactctgtctcaaaaaaaaaaaaaaannnnnnnnnnnnnnnnnnaanctcgtnttngnaaggaaanggggnaanggaccggtnttatncctatgtngtntttgcaggcaaangaaanggacccntttttgtaaaaaaaagtcttttgnncaantaaacggggtntgngggtncaggccctggnggggcncncanttgcctggnggcttntgnnaaatcggnaaagggaggaaaggc

SEQ ID NO: 11 - DNA, 300 bp, Homo sapiens
  misc_feature (1)...(300): n = A,T,C or G
cgtctgtaatcccagctgcttgggaggctgaggcaggagaatcacttgaaccctggaggtggcggtttcagtgagcacagatcatgccactgcactccagcctgggcaacaaaacgagacttcgtctcaaaaaaaaaaannnnnnnnnnnnnnnnnnnnnnncgggttctcccaaattntttnnaggggnccatggncaactgnttnacntttgtttnggnaaccccntgcccnaagncgcananaggctgtnnttnnccttgttnccaaggntgaggancaaaaagtaccctntgtttt

SEQ ID NO: 12 - DNA, 300 bp, Homo sapiens
caaagatggtcgtattactaaaggtgaataaccagcgcggggggcacgtggagtcactggaacatttgtgcaatgctggtgggaatgtcaacccgtgcggccctctggaataagcctggcagctcctccaagagttaccgtgtgacccagcaattccactcctagctccacccacaggaattgaaagcaaagacgcaaacagatgcctgtgcaccaaagttcacggcagcatccttcgccatagtggcagcatccgtcgtcacagcggcatcatccttcatcatagcggcagcatccgtc

SEQ ID NO: 13 - DNA, 278 bp, Homo sapiens
  misc_feature (1)...(278): n = A,T,C or G
cctgcagccactaatgcattgtgtatgataacaaaaactctggtatgacacattttctgtgatcattgttaattagtgacatagtaacatctgtagcagctggttagtaaacctcatgtgggggaggtgtgggaggttttnncgnnannnnnngcnnnnnannccccggnnngnnngaagctgnnnnttnnaannngcnnnnnannatganaannnccnnngactggnnnnangaggcctancccntgntttananaaacnnncnncagnntctctca

SEQ ID NO: 14 - DNA, 300 bp, Homo sapiens
gtgtcttcatcttacccagtggaacctaagaaattaaattctccagaagaaactgcttttcagacaccaaaatctagccagatgcctcggccttcagtgccaccattagttaaaacatcactgttttcttcaaaattatctacacctgatgttgtgagcccatttgggaccccatttggctctagtgtaatgaatcggatggctggaatttttgatgtaaacacctgctatgggtcaccgcaaagtcctcagctaataagaagggggccaagattgtggacatcagcttctgatcagcaa

SEQ ID NO: 15 - DNA, 300 bp, Homo sapiens
gttatattaaattattctttgtttttctttttcttttaataaagcctgcaagttactaaattgtagtttcataaattctgtagtaaagtatcatcttggcagtgtgccaaaggtgaaaatgatgctttctctaacagagaaattcttagtgactccagtcgtagaaaaacgtctttacaacctgaataagattgaagaattgtgaacataccatggcctattggatgaatcatttgccgtaggctaaatcagactgtagggtttgcgatggatttatggagtatgtgggtatagaaatca

SEQ ID NO: 16 - DNA, 276 bp, Homo sapiens
  misc_feature (1)...(276): n = A,T,C or G
gtttcatttaagaagaatgagctagataaatgtgctcttctggttaccccaccctgacagagtgcatttttacacggctagcaggggttgagactgcagcctggcctnnnnnnnnnnnnnngnnnnnngcnnacttnacttcccngaancactataattggnanacnttnctaannggtnatctngccgacctgnnagatanactcnngataaaanccnntgcagaaagcgcccttccatgtcangcncntnaganacnnncntaccncctangna

SEQ ID NO: 17 - DNA, 300 bp, Homo sapiens
ggtgcccatcaccacacccagctaacttttgtatttttagtagagacggggtttcaccatgttggccaggctggtcttgaactcctgacctcgtgatccgcccgccttggccccgcaaagtgctgggattacaagcatgagcccagcgcctggctgtatctttcattttacccaagtcactttacccaagtaagtaattaggggaaagcctgagtcttgtaccacctgttcatttggggaactgtgggaaacggagccaacggacctaagtgccctttgacagtgagtttcataccattt

SEQ ID NO: 18 - DNA, 273 bp, Homo sapiens
ctcagctgaggcaattaaactggaaaagaaatagattgaaaagatactacagaagaagcagtacagaagttgggggactgaaggagagggagccactgcaggtgctagctgcttaaggggataccagtccttttacagatataatagatacagcttctgaggtggagggtgataggagtgtgtagagaaattgcagttcagaactggagcatgcagttaggcaagaggcatcccatgtgaagatgtcaagcaagtactggaaaatgctgaact

SEQ ID NO: 19 - DNA, 300 bp, Homo sapiens
gggtcctggtgggagttccatccagcagtgagtgcattttttccccagagcagttaagggtcttattaaaagccaccactttgctgaggcctgtacaggccttgggggtttggggaagagaaataaggcaggcacttgtcccttcagggagggacttgtccctcactgggaggtttggggttgaccttggctccagcagagatacccagcctggcgtggaaggggcaggtctgagcttacgcttgactgcagggcaagctgcaggcctcttctgccttcccctgcattcaccaaggacag

SEQ ID NO: 20 - DNA, 300 bp, Homo sapiens
atggcatgcactgacctcttcttggagcccagaactttatagagttgcctaccagggttactgtaatggaatttatgatcttaagaaattactagttgtattatttatcctatgattcattcattcaataagcttttactgcataaactttacatccagcactgtagttaagtacccaaaattgaatagaaataatggcttttgaaaatcgcacaaagcaggccaggcacggtggctcacgcctgtaatcccagcattttgggaggccgaggcaggcggatcacgaggtcaagagatcca

SEQ ID NO: 21 - DNA, 293 bp, Homo sapiens
  misc_feature (1)...(293): n = A,T,C or G
cgtctgtaatcccagctgcttgggaggctgaggcaggagaatcacttgaaccctggaggtggcggttgcagtgagcacagatcatgccactgcactccagcctgggcaacaaaacgagacttcgtctcaaaaaaaaaaannnnnnnnnnnnnnnccttnggncgggttntcccaaattnttttgaggngnccatggncaactgcttnanctttgttttggcaaccccntgcccnaagtcgcatataggctgtncttcaccttgtttccaaggctgnggaacanaaagtaacct

SEQ ID NO: 22 - DNA, 300 bp, Homo sapiens
ctggtctcgaacacctgacctcaggtgatccattcgtcttggcctctcgaagtgctgggattccaggcgtgagccactgcggccagcacatttccacttttagatcctactccataccacaggtttcatttaagaagaaagagctagataaatgtgctcttctggttaccccaccctgacagagtgcatttttacacggctagcaggggttgagactgcagcctggcctgccagccattggaggtgtttaaggaagggcagataatgtgactctttgcggggtgccatctgcttacccat

SEQ ID NO: 23 - DNA, 300 bp, Homo sapiens
gaaccaaagacgtgtatggagtgttctcttgtccttatcgacttgctctgctcccagctttccaagcgaccggatctgagtgatgcttctagaacatttgggtgttggggggttcccaatagtagaaagggtccccattcctgctcagcaccgcacctctctacccccccacagacacacatgcagacacacacatgcagacaacacgcagacacacacatgcaggcactcacatgcaggcccatgcacacacacgtgcacacacatgcagagacatgcagacacgcaggcacacatgca

SEQ ID NO: 24 - DNA, 300 bp, Homo sapiens
cctcccacaacacgtgggaattcaagatgagatttggttggggacacagccaacccatatcacccatgcctggatgcccttctcatgcttgggttctgtcatctgcaccaggccttctgctgcccgtctgtcttacccaccaggactctgactctccacgctgggccacctctcttctccaacactgctatggattgaatgtttatgttatccccaaatttgcatgttgcaatcccaatctccaatgccatagtattaggaggtgggggcctttgggaggtgatttggtcatgaaggtgg

SEQ ID NO: 25 - DNA, 300 bp, Homo sapiens
ggaaaatgaaatctgactatctgctagttgccaaaacccagaaacattcctgtgtaatggttagttgggaaagaaggcagcacttgaaaaaatttaccaggttcctcactgggagatgtgggaaggggcgtgggacgcacgcggtcactccctctcagccccccacatttctagaacacactgtagctgtgcctctacagactcccgctgcctggcctccacagatcctgctcagattcaccagtaggcaaagcttggccctattagctttttctctccatggctctgtgggaatgtgcg

SEQ ID NO: 26 - DNA, 300 bp, Homo sapiens
ctgcagtgagattctctgcaatgactggcctcagcaagggggcagcttaggaccctgacatcccaggtcactaagccacataggataagtaatgggtggacagaagcgggaaaggagaagggcagggcacatgtttaaaacttgaactttctgaggctaagactggaaaaggaatggtttcagctgatatatttggataccagttgactatttttaggaaaaaaacacaaatggcttttaaacatcacagtgtgatacagtctaactcagaattagagacaggcaaaacagaactccatc

SEQ ID NO: 27 - DNA, 300 bp, Homo sapiens
gtactgcttctgtggctcttcacagacctcacggatgtgaccggagatgagtgccgatgaccacgttttaaaggagaaagagagctcctggtggggccctcggggtggtctcaggtcccatttgcagtctgcaacagtgacgcgcagcccggtccggagcgtggtgagctttgtttgccttctgggtcagctttcgctgtgtctcctgtgtgtgttagaatccagagcccagaggaagtgcaagcgggtcctccgccaacggggagagcctcttcgcggcgctgttggcgacagcacgct

SEQ ID NO: 28 - DNA, 298 bp, Homo sapiens
  misc_feature (1)...(298): n = A,T,C or G
aangnaannnnggggngttgantcnacctnngaaccgtgtanaaacccatggaaacagctantagannttgggcaggancagagngaggccaagntacgggggaggcnaggagcngagantggggnnnnnnnangnnaantnnngaaggggngnganngagggggggananaaggggggangagggcgaangncaggannnagaaaannnggggacgananggngaacagggnnnaaacggaannnnggagnnnnnanagatgncgggcagngncngngnaggnganannngagacgg

SEQ ID NO: 29 - DNA, 300 bp, Homo sapiens
cctcagccccacaccagctctatttcaggggtgagagtcagagagcactgcaatatgtgcttcatgggatttcgattcgaagatcctagaccagggagacactgtgagccagggatacaacaaaatactaggtaagtcactgcagaccgacctccctgcagtttgggaaagaagctgggtttgtggagaatcagagcatcttgacatgactgctgacctaaagatccctggcattggccagggatcctgtggaacctcttctagttcaggggtgtgagcattagactgccagttgtctag

SEQ ID NO: 30 - DNA, 300 bp, Homo sapiens
  misc_feature (1)...(300): n = A,T,C or G
gtttgtttccccgagatgtgaacttgctgaaggaaaacagtgtaaagaggaaggccatacagagaactgtcagctcttcaggatgtgaaggcaagaggaatgaagacaaggaagcagtgagcatgttggttaactgccctgcctactacagtgtgtctgctcccaaggctgagctactgaacaaaatcaaagagatgccannnnnnnnnnnntgaggaagaggaacaggcanatgtcaatgaaaagaaggctgatctcattggaagtctcacccacaagctggagaccctccaggaggcg

SEQ ID NO: 31 - DNA, 300 bp, Homo sapiens
tttaaactgagctccaaatgacgttcaaacacccctctcgggtagagttttcatggtggaacggttgcgcccaccaaacagaagcttatgtttttggcacagaaggcctgggccattttcatggacacctggctggacctcggtggaagtgaactccgtaggttgttgcgttcactgcagcacctcacatgataccgtcccctctcatggaacggagcctcccccatgcagcccccactcaaatggagttttaaaggctgggttcaggttacgggggcgtttctcaccgtctgaatgcgg

SEQ ID NO: 32 - DNA, 300 bp, Homo sapiens
gtgaaacagaaagtggagatgctttccttgacctgaagaagcctcctgcctccaaatgcccccatcgctatacaaaagaagaactcttggatataaaagaactcccccattccaaacagaggccttcatgcctttctgaaaaatatgacagtgatggtgtctgggaccctgagaagtggcatgcctctctctacccagcttcagggcggagctcaccagtggaaagtctgaagaaagagttggatacagaccggccttccctggtgcgcaggatagtagatccacgagagcgtgtgaaag

SEQ ID NO: 33 - DNA, 300 bp, Homo sapiens
gtctgattgaagctgttcaggtttatcatgcaaatcctcgcctctggctacggctggctgaatgctgcattgctgccaataaggggacttctgaacaagaaactaaaggccttcccagcaaaaaaggaattgtacagtctattgttggtcaaggctatcatcgtaaaatagttttggcatcacagtctatacagaatactgtttataatgatgggcagtcttcggccattcctgtagccagtatggagtttgcagccatatgtctcagaaatgccttgttgctgctacctgaagaacagc

SEQ ID NO: 34 - DNA, 300 bp, Homo sapiens
tgacagagctgttcagcgtacaccagatcgatgagctggccaagtgcacatcagacactgtgttcctggagaagaccagtaagatctcggaccttatcagcagcatcacgcaggactaccacctggatgagcaggatgctgagggccgcctggtacgcggcatcattcgcattattacccgaaagagccgtgctcgcccacagacctcggagggtcgttcaactcgggctgctgccccaaccgctgctgcccctgacagtggccatgagaccatggtgggctcaggtctcagccaggatg

SEQ ID NO: 35 - DNA, 300 bp, Homo sapiens
cttttttaagcaaagcagtttctagttaatgtagcatcttggactttggggcgtcattcttaagcttgttgtgcccggtaaccatggtcctcttgctctgattaacccttccttcaatgggcttcttcacccagacaccaaggtatgagatggccctgccaagtgtcggcctctcctgttaaacaaaaacattctaaagccattgttcttgcttcatggacaagaggcagccggagagagtgccagggtgccctggtctgagctggcatccccatgtcttctgtgtccgagggcagcatg

SEQ ID NO: 36 - DNA, 300 bp, Homo sapiens
gctggccaaagccaaatctcctaagtccaccgcccaggagggaaccctgaagcctgaaggagttacggaggccaaacatccagctgcagttcgcctccaagaaggggtccatggccctagtcgagtccatgtgggctctggggaccatgactattgtgtccggagcaggacccccccaaaaaagatgcctgccctagtcattccagaggtgggctcccgatggaatgtcaagcgccatcaggacatcaccatcaaacctgtcttgtccttgggcccagctgcccttcgccccatgcatag

SEQ ID NO: 37 - DNA, 300 bp, Homo sapiens
gtccaaggacaacttcgagacatttctttttgccaccgtatctaacagggagcaggaagatctctgccgaggaattgtccagctctgcttcaatgagcaaagccaacagctgctagcagaggtccagccctctgactctttcctcatggtagagacaactgcatactttgaggcctacaggcacgtcctggaaggactccaggaggtccaggaggaagatgttcccttccagaggaatatcgtggagtgtaactctcatgtgaaggagccaaggtacttgctaatggggggcagatatga

SEQ ID NO: 38 - DNA, 300 bp, Homo sapiens
  misc_feature (1)...(300): n = A,T,C or G
catccagggagaacctcggggctgggacacctcctggccctcaccctgggtcatgtttacagtcctcagtgccccacaccggtggccccctgaggacacctccaccctgaccttgattttcccaaacgctgcctcttggtgacagactcagcccaaaaccccttccttctgtctctggagacccttgagcttggggaaatatggaggggtgtgtgtctgcaatcaaggcctctgcagctcacggctggcccggtgggctgggacttccgtatgaattntaaatacttagggttcattttt

SEQ ID NO: 39 - DNA, 300 bp, Homo sapiens
gggaaggagcgggcgtgaggccagctgaggcatggtgacccctgggaaggagcgggcgtgaggccagctgaggcatggcgacccctgggaaggagcgggcgtgaggccagctgaggcatggtgacccctgggaaggagcgggcgtgaggccagctgaggcatggtgacccctgggtacgggggacttgggggccgcaccttggtttgcccagggcccctcctgcaccacgggccacatgcggaggacggcgtgggataggctccctgggtccacagcttctgcccgtgtatggggaaccc

SEQ ID NO: 40 - DNA, 300 bp, Homo sapiens
ccaaaagcttgtggcaaatttgaaatttctgccattagggaccttacaactggctatgatgatagccaacctgataaaaaagctgttcttcccactagtaaaagcagccaaatgatcaccttcacctttgctaatggaggcgtggccaccatgcgcaccagtgggacagagcccaaaatcaagtactatgcagagctgtgtgccccacctgggaacagtgatcctgagcagctgaagaaggaactgaatgaactggtcagtgctattgaagaacattttttccagccacagaagtacaat

SEQ ID NO: 41 - DNA, 300 bp, Homo sapiens
aaaaggtcccccttctgggaaagaccgagtgaagaaaggtggatcctacatgtgccataggtcttattgttacaggtatcgctgtgctgctcggagccagaacacacctgatagctctgcttcgaatctgggattccgctgtgcagccgaccgcctgcccactatggactgacaaccaaggaaagtcttccccagtccaaggagcagtcgtgtctgacctacattgggcttttctcagaactttgaacgatcccatgcaaagaattcccaccctgaggtgggttacatacctgcccaatg

SEQ ID NO: 42 - DNA, 300 bp, Homo sapiens
ttctaagtcaggagtacagtacaaaggacatgtggagatccccaatttgtctgatgaaaacagcgtggatgaagtggagattagtgtgagccttgccaaagatgagcctgacacaaatctcgtggccttaatgaaggaagaaggggtgaaacttctaagagaagcaatgggaatttacatcagcaccctcaaaacagagttcacccagggcatgatcttacctacaatgaatggagagtcagtagacccagtggggcagccagcactgaaaactgaggagcgcaaggctaagcctgctcc

SEQ ID NO: 43 - DNA, 300 bp, Homo sapiens
gccaccgaagcttcaggatgacatcttagactctcttggtcaggggatcaatgagttaaagactgcagaacaaatcaacgagcatgtttcaggcccctttgtgcagttctttgtcaagattgtgggccattatgcttcctatatcaagcgggaagcaaatgggcaaggccacttccaagaaagatccttctgtaaggctctgacctccaagaccaaccgccgatttgtgaagaagtttgtgaagacacagctcttctcacttttcatccaggaagccgagaagagcaagaatcctcctgc

SEQ ID NO: 44 - DNA, 300 bp, Homo sapiens
ggcttatacaacatagtggggaacgcatgggaatggacttcagactggtggactgttcatcattctgttgaagaaacgcttaacccaaaaggtcccccttctgggaaagaccgagtgaagaaaggtggatcctacatgtgccataggtcttattgttacaggtatcgctgtgctgctcggagccagaacacacctgatagctctgcttcgaatctgggattccgctgtgcagccgaccggctgcccactatggactgacaaccaaggaaagtcttccccagtccaaggagcagccgtgtc

SEQ ID NO: 45 - DNA, 300 bp, Homo sapiens
gtggaagaaaattttttgctgcttctggttcccagaaaagggagccattttaacagacacatctgtcaaaagaaatgacttgtcgattatttctggctaatttttctttatagcagagtttctcacacctggcgagctgtggcatgcttttaaacagagttcatttccagtaccctccatcagtgcaccctgctttaagaaaatgaacttatgcaaatagacatccacagcgtcggtaaattaaggggtgatcaccaagtttcataatattttccctttataaaaggatttgttggccag

SEQ ID NO: 46 - DNA, 300 bp, Homo sapiens
  misc_feature (1)...(300): n = A,T,C or G
gtggaagaaaattttttgctgcttctggttcccagaaaagggagccattttangngacacatctgtcaaaagaaatgacttgtcgattatttctggctaatttttctttatagcagagtttctcacacctggcgagctgtggcatgcttttaaacagagttcatttccagtaccctccatcagtgcaccctgctttaagaaaatgaacttatgcaaatagacatccacagcgtcggtaaattaaggggtgatcaccaagtttcataatattttccctttataaaaggatttgttggccag

SEQ ID NO: 47 - DNA, 300 bp, Homo sapiens
acacagataattttaatacaatgtgaaaaagtgtatgggtgtgtagaagaggggttcttagagtttctggagagaatgattctgagctcggttttgacaaaagaggagctgctgaggctaaaagtggatgaaaagggccttataattaaaagaaacaagacaggactcagaggtgtgaaacaaatattatgcatggtgaattacaatgagttgggggtattctgtagccctaaagtacaaggtataaagagacagaaaatgatcctggaatatagacagaggatacttcatctctcatga

SEQ ID NO: 48 - DNA, 300 bp, Homo sapiens
gatggaacatgagtggaagtgggcagtctttttctttccctatcagctgagtgaatgaagatttagagggcagcagagtcatgacatggatgacgttgggtctctggatggctaaatggaagacccgccccccaacgccactctacccccctgctttgaactatgctttgagaaatgagcttatgagaccactgagacttgggggctgtttgttcagcagttcacctacacttattaggaaaggttgacttcttgtaactacgcctttccttaaatcatcttttgtataattctcagaag

SEQ ID NO: 49 - DNA, 300 bp, Homo sapiens
ccctccccggcttcccccggagtgggtcaccacactgttttttatcatcatgggaatcatttcattgactgtcacatgtggtttgctggtggcttcccactggcgaagagaagctacaaaatatgctcgatggatagcattcactggaaccactatgagaagattataggaaaaacaccaagactagaggactctgggttccttttatgcaaagtcaactcttctgggtcacagttacccagcaacaaaaataaagagaggaccaggacgatgccagcaccccgtttatcctgagtgaac

SEQ ID NO: 50 - DNA, 300 bp, Homo sapiens
ctcctgtctcagcctcctgggtagctgggactacaggtgcatgccaccatgcctggctaacttttgtatttttagtacagacagggtttcaccacattggtcaggctggtctcgaactcctaacctcaggtgatccacctgccttggcctcccaaagtgctgagattacaggcgtgagccaccgcgcctggcctgattggttttttaacatgatttttctctaagcttaaataccacaaggccaaagagaaatggtcataatttaaaccattattatattggtgaggtatccctagctat

SEQ ID NO: 51 - DNA, 300 bp, Homo sapiens
ggaggctagactcaagctgtctggagagtgtgaaacaaaagtgtgtgaagagttgtaactgtgtgactgagcttgatggccaagttgaaaatcttcatttggatctgtgctgccttgctggtaaccaggaagaccttagtaaggactctctaggtcctaccaaatcaagcaaaattgaaggagctggtaccagtatctcagagcctccgtctcctatcagtccgtatgcttcagaaagctgtggaacgctacctcttcctttgagaccttgtggagaagggtctgaaatggtaggcaaag

SEQ ID NO: 52 - DNA, 300 bp, Homo sapiens
atatggtatagttggaaataggttattgtgagttatttgtagtcatgtctttaatggcccttgcatggtgtctaacttctgcaataaatgatctgccagtcctagtgtctggctttatgcaatttgttttcctttgtggatgaagtgggagtaagacttgttgctgtgaggattagatgaagtggctaggatatggacacactttacttgaattggaaaacaagccatgtatccctaatctgcaaaatgtggcatgtcacacgtgtaatctctgaggtttagtttttgctcaagattgca

SEQ ID NO: 53 - DNA, 300 bp, Homo sapiens
aagaagctctgcttggtactactattatgaacaacattgttatttggaatttaaaaactggtcaactcctgaaaaagatgcacattgatgattcttaccaagcttcagtctgtcacaaagcctattctgaaatggggcttctctttattgtcctgagtcatccctgtgccaaagagagtgagtcgttgcgaagccctgtgtttcagctcattgtgattaaccctaagacgactctcagcgtgggtgtgatgctgtactgtcttcctccagggcaggctggcaggttcctggaaggtgacg

SEQ ID NO: 54 - DNA, 300 bp, Homo sapiens
ccaagatgccaatttccatgaagtcttgatttatatatatgtacacatgttatgcacatacatgtttgttttctaacagttattttttaagcttttgagataattttagacttacagaagagttgtaaaagtagtagagttcttgtatactctgcacccaccttgcccttatgttaacatcttacgtaacaatagaacatttgtcaaaattaagaaattaaccttgatataatactaactaaagtagaaagtttaaaaagtagagattttagtcttttcactaatgtccttttactgttc

SEQ ID NO: 55 - DNA, 300 bp, Homo sapiens
gggagggacccttgggggcaggttgtgggtagccagttgcagtctgtggcctccctcagaggtttggagtcgggcgtggcatgctgctgttggcctctttccgagggagtgccatccactccctgtcccaccgctgtccgcggtgaggacagtgagggcagtgctacgtggtggggaggtgtgtgagaagccacggaagggcttcacagggcagatgccaaggccagtgggccccggacagagtcaggctccctgggcggccttgtgtcttggtggccctgatcatcctgccaatgcaaa

SEQ ID NO: 56 - DNA, 300 bp, Homo sapiens
ctttgctctctccattccaagttgttctctgttctagaaagcagatgtagtagacatctactgtttttgcctaaacagaatccctttttcctttttttgttaaaagtactcatccctaatattacattgttctggaaggactgaaaataacagaactcagcaccatgatcggaccgggacaatcagattatttcattcctcagcaaacggagatcgatccgaaaagtggaaatatgagctcttctttggtgttggcatatggaccctgagagaaagaactttaattttttctcttggact

SEQ ID NO: 57 - DNA, 276 bp, Homo sapiens
  misc_feature (1)...(276): n = A,T,C or G
cctccctggatgtgcagacatggaggaggacagaaggcccagctcagtggcccccgctccccaccccccacgcccgaacagcaggggcagagccagnnnnnnntcgaagtgtgtccnngttgtcttttganccttgttntggngccttgcctanatgtatntnntntnnntntnntnatttnnnnnntnnntnnnttnctnttnntaaattgnttnnaanttntnntannttnttnnattnnnannnnnnntantgtnntgnattgntatnnatca

SEQ ID NO: 58 - DNA, 300 bp, Homo sapiens
ctgtaagtctctttcttgcccatcaccacatccctagtactgggtatcagtctggccacttggctttctggtttgccccaatgtggtctattcttgatgcagctaccaaagtaatgttttaaaaccattataccaagttactatccttgtcaaaacccccagtaactgccaatctcacttagaataaaatccggactcctgtgaagcacagcataaactggccactgcctatgcagcaacctcatctttaccgtttcctgccttgctcactcccttccagcgccgttattcttcctgatg

SEQ ID NO: 59 - DNA, 300 bp, Homo sapiens
  misc_feature (1)...(300): n = A,T,C or G
gacccaggtagaccagctcaagagttcatgttctttgtcatcctngtgtgagctctctgtaagtctctttcttgcccatcaccacatccctagtactgggtatcagtctggccacttggctttctggtttgccccaatgtggtctattcttgatgcagctaccaaagtaatgttttaaaaccattataccaagttactatccttgtcaaaacccccagtaactgccaatctcacttagaataaaatccggactcctgtgaagcacagcataaactggccactgcctatgcagcaacctca

SEQ ID NO: 60 - DNA, 300 bp, Homo sapiens
gggtcctggtgggagttccatccagcagtgagtgcattttttccccagagcagggtaagggtcttattaaaagccaccactttgctgaggcctgtacaggccttgggggtttggggaagagaaataaggcaggcacttgtcccttcagggagggacttgtccctcactgggaggtttggggttgaccttggctccagcagagatacccagcctggcgtggaaggggcaggtctgagcttacgcttgactgcagggcaagctgcaggcctcttctgccttcccctgcattcaccaaggaca

SEQ ID NO: 61 - DNA, 292 bp, Homo sapiens
  misc_feature (1)...(292): n = A,T,C or G
caaggcccgaggtgccatcccctctgggaagcagaagcctggnggcacccagagtgggtactgtngnggtaaagngntcaccctctcacagcaccaccagcggcgagacagaccccaccaccatcttcccctgcaaggagtgnggcaaagtcttcttcaagatcaaaagccgaaatgcacacatgaaaactcacaggcagcaggaggaacaacagaggcnaaaggctcagaaggcggctttngcagctgagatggcagccacgattgagaggactacggggcccgtgggggc

SEQ ID NO: 62 - DNA, 300 bp, Homo sapiens
agcaaatcaagatcttcaggtacagttggaccaggcactccagcaagccttggatcccaatagtaaaggcaactctttgtttgcagaggtggaagatcgaagggcagcaatggaacgtcagcttatcagtatgaaagtcaagtatcagtcactaaagaagcaaaatgtatttaacagagaacagatgcacagaatgaagttacaaattgccacgttgctacagatgaaagggtctcaaactgaatttgagcagcaggaacggttgcttgccatgttggagcataataatggtgaaataaa

SEQ ID NO: 63 - DNA, 300 bp, Homo sapiens
caggcctggacttcgcccccaggcctaggaccgcggagggtggaaccctgctactgccccaacagggactccaatcaatcggagttctccccttgccggagctgcccttcacctttggggcccgagacagtcataagggatggacttagttttcttgcagggaaaaaggtggacagccgtgtttcttaaggatgctgagggcatggggccaggaccaggggagaggcacagctccttcctgagcagcctctcaccactgccacaaggctccctaatgctggtctctgctccactccccgg

SEQ ID NO: 64 - DNA, 294 bp, Homo sapiens
gctgcatctgcaatgaggatgccaccctacgctgcgctggctgcgatggggacctcttctgtgcccgctgcttccggtgggtgcaggtggaatgttctgtgcgagagctcaagggctgcctggatccctgacttgtatccctttgttccacagagagggccatgatgcctttgagcttaaagagcaccagacatctgcctactctcctccacgtgcaggccaagagcactgaagacaccctggtcctcccggaagggcagtcccacaggcagcggcacccatttctgggccccg

SEQ ID NO: 65 - DNA, 300 bp, Homo sapiens
aattgatgagccttattaactatcttttcattatgagacaaaggttctgattatgcctactggttgaaattttttaatctagtcaagaaggaaaatttgatgaggaaggaaggaatggatatcttcagaagggcttcgcctaagctggaacatggatagattccattctaacataaagatctttaagttcaaatatagatgagttgactggtagatttggtggtagttgctttctcgggatataagaagcaaaatcaactgctacaagtaaagaggggatggggaaggtgttgcacattt

SEQ ID NO: 66 - DNA, 300 bp, Homo sapiens
agcagatttgtgataaacttgctgtagaagaaaccaaaggggaacttctgttgcaactatgtcgtttggaagatgctgcagatgtttatagaggattgcaagagagaaatcctgaaaactgggcctattacaaaggcttggaaaaagcactcaagccagctaatatgttagaacggctaaaaatttatgaggaagcctggactaaatatcccaggggactggtgccaagaaggctgccgttaaactttttatctggtgagaagtttaaagaatgtttggataagttcctaaggatgaatt

SEQ ID NO: 67 - DNA, 300 bp, Homo sapiens
  misc_feature (1)...(300): n = A,T,C or G
tgttcttgtagtgtttgttgctattgttagaaagattattagtgatatgtggggtgtcttanctaaacaacagacacatgtaagaaaacaccagtttgatcatggagagctggtttaccatgcattgcaattgttagcatatacagcccttggtattttaattatgagactaaaactcttcttgacaccacacatgtgtgttatggcatcactgatctgctcaagacagctatttggatggctcttttgcaaagtacatcctggtgctattgagtttgctatattagcagcaatgtcaat

SEQ ID NO: 68 - DNA, 300 bp, Homo sapiens
agacaaagaaaaggtggcaatcatagaagagttagtagtaggttatgaaacctctctaaaaagctgccggttatttaaccccaatgatgatggaaaggaggaaccaccaaccacattactttgggtccagtactacttggcacaacattatgacaaaattggtcagccatctattgctttggagtacataaatactgctattgaaagtacacctacattaatagaactctttctcgtgaaagctaaaatctataagcatgctggaaatattaaagaagctgcaaggtggatggatgaggc

SEQ ID NO: 69 - DNA, 300 bp, Homo sapiens
  misc_feature (1)...(300): n = A,T,C or G
aattcnacacgaggtggcccataagttttaccttttaaacatccggctgcctgtgaatgagaagaataaaatcaatgtgggaattggggagataaaggatatccggttggtggggatccaccacaatggaggcttcaccaaggcgtggtttgccatgaagacctttcttacgcccagcatcttcatcattatggtgtggtattggaggaggatcaccatgatgtcccgacccccagtgcttctggaaaaagtcatctttgcccttgggatttccatgacctttatcaatatcccagtagg

SEQ ID NO: 70 - DNA, 300 bp, Homo sapiens
cccaaggcaagctgttaacaaaatcaacctgggccaatcatcaaagggttggacctaaggttgctatactcaatagaacaagcattttaaataaatttctcgtaagttgttgctttctttatgtggtgggtgtggctttaaagagcacaaaaccacaacaaatcaaagagtagctcgggcttgtcttttgctttatggctgagggtttgaaggatgattcatggacttgtgaatgccagccccagtcccggcttaggtctatctgccaataccaccagggccaacaaattcacgcaacaa

SEQ ID NO: 71 - DNA, 300 bp, Homo sapiens
ggaaatgcaagtcaaaacagctttgtaggtctcagagtttgcttttaagaagtagtacaagaaggaatagttatatcaatacaccagtggctgaaattatcatgaaaccaaatgttggacaaggcagcacaagtgtgcaaacagctatggaaagtgaactcggagagtctagtgccacaatcaataaaagactctgcaaaagtacaatagaactttcagaaaattctttacttccagcttcttctatgttgactggcacacaaagcttgctgcaacctcatttagagagggttgccatcg

SEQ ID NO: 72 - DNA, 300 bp, Homo sapiens
ggattctttcactgagcacaaagagttgttggggctttagcatctgactgattttgttacggggttgattctgaccataggaagtatgcaatgtgaatcactatttacagagaaacctacaacagatgcttgatgttgtagaaactgggacatatagataccaagcaaaattataagaaacctataaggtgttcaatacgcttgtgtttccaaaattcactgtacatgatcagtttggtgttcttgtaccacagtttttaactgaaggaaccagttgtaacagtctcaattttaactaaa

SEQ ID NO: 73 - DNA, 300 bp, Homo sapiens
ataacacacatcacagtatgctctcagaaatttctttatttgaaccctataccaatatctgttgatcaatgaccatttttgctcagcatggagaaacagtgccctgcatgaagggtagtgagaataaaaaggatcttaccacctttatcatgagggtggctttgctctctccattccaagttgttctctgttctagaaagcagatgtagtagacatctactgtttttgcctaaacagaatccctttttcctttttttgttaaaagtactcatccctaatattacattgttctggaaggac

SEQ ID NO: 74 - DNA, 300 bp, Homo sapiens
  misc_feature (1)...(300): n = A,T,C or G
cagagtcaacatggagcatctcactgtgaaatgatccatggattgaaggatatggtaaaatgtttataggttactttgaaagtaaaatatactatgtcttggttttgaggatattggatacaaaactctcttcctttagggctactgagacttgattcctgatcatcagaaatttcaccagaaacaacttgcttccaatatacccaattctatatgaagaattcatggagagtgtactggcactgnnnnnnnnnnnnganncntgctgctncgaanntntnntattnactgannntgaat

SEQ ID NO: 75 - DNA, 300 bp, Homo sapiens
caagagagagtgatagaattggcagtgaaatatacgaaccaccctcctgccctctgggttcacaatacgtgtacacttgactgtgaagtggctgtgagagtgggtggagagttcttctttgaccctcagcctgcggatgcctctagaaacctcgtgttgattgcaggaggagtcggaattaaccctctgctttccatcctgcggcacgcagcagatctcctcagagagcaggcaaacaaaagaaatggatatgagataggaacaataaaactattctacagtgcaaaaaataccagcgaa

SEQ ID NO: 76 - DNA, 300 bp, Homo sapiens
gctagacgaagtggtgaagcccaaggacttatttttgagctcgctgtaagactgagaaatcacgtactccttcctgaaaccactaagaggaaaaatgtctgtgacactgcatacagatgtaggtgatattaaaattgaagtcttctgtgagaggacacccagaacatgtgagatggagtctcgctgtgtcccccaggctggagtacaatggcgcgatctcggctcactgcaacctccgcctactgggttcaagcaagtcttctgcctcagcctcccgagaactgcaagaggaggcaactg

SEQ ID NO: 77 - DNA, 300 bp, Homo sapiens
agagacttttgtttgtgtttaattagggctatgagagatttcaggtgagaagttaaacctgagacagagagcaagtaagctgtcccttttaactgtttttctttggtctttagtcacccagttgcacactggcattttcttgctgcaagcttttttaaatttctgaactcaaggcagtggcagaagatgtcagtcacctctgataactggaaaaatgggtctcttgggccctggcactggttctccatggcctcagccacagggtccccttggaccccctctcttccctccagatcccag

SEQ ID NO: 78 - DNA, 300 bp, Homo sapiens
caggagcaatcaattcctgtcgaagtgaataccatgcagcttttaacagtatgatgatggaacgcatgaccacagatatcaatgcactgaagcggcagtactctcgaattaaaaagaagcaacagcagcaggttcatcaggtgtacatcagggcagacaaagggccagtgaccagcattctcccgtctcaggtaaacagttctccagttataaaccaccttcttttaggaaagaagatgaaaatgactaacagagctgccaagaatgctgtcatccacatccctggtcacacaggaggga

SEQ ID NO: 79 - DNA, 278 bp, Homo sapiens
gtgctgcagaggaagacagcctgtcaggatactgacgaggaggaggaagaggaagatgatgatcaggctgaatacgacgccatgttgctggagcacgctggagaggccatccctgccctggcagccgcggctgggggagactcctttgccccattctttgccggtttcctgccattattggtgtgcaagacaaaacagggctgcacagtggcagagaagtcctttgcagtggggaccttggcagagactattcagggcctgggtgctgctcagcccag

SEQ ID NO: 80 - DNA, 300 bp, Homo sapiens
ggaacttctgagtaattggtatcatttcctagtgactcggctcttgtactccaatcccacagtaaaacccattgatctgcactactatgcccagtccagcctggacctgtttctgggaggtgagagcagcccagaacccctggacaacatcttgttggcagcctttgagtttgacatccatcaagtaatcaaagagtgcagcatcgccctgagcaactggtggtttgtggcccacctgacagacctgctggaccactgcaagctcctccagtcacacaacctctatttcggttccaacat

SEQ ID NO: 81 - DNA, 300 bp, Homo sapiens
  misc_feature (1)...(300): n = A,T,C or G
acctgtaccgcctggccactggctgtcaccggcgtgatgagctgccggtgttngaacgcaacctatgctggactctcccggcagactgcctggatatggtcgccatgcaggaagccgcccagcacctcctcggcacacacgacttcagcgccttccagtccgctggcagcccggtgccgagccccgtgcgaacgctgcgccgggtctccgtttccccaggccaagccagccccttggtcacccccgaggagagcaggaagctgcggttctggaacctggagtttgagagccagtctttcc

SEQ ID NO: 82 - DNA, 300 bp, Homo sapiens
cccagctggacctggtggccctttcctagtgcctctgctgggggaggagaacctgggtccacgtggaggctaggaggtctcaggtgctgccctggcagcaccagagtgtgggccgggcccgagtgtctgcccctcggccctcagggtggggcacttagcacccagaagggaccaaaagcagggcatggcggtgcagaggagtttgggaggtgtaaacagccccatgcacgtggaggaggagctggctttcagccccagaccccacgctagcactttccacgctgcttgcccgctgttgat

SEQ ID NO: 83 - DNA, 272 bp, Homo sapiens
tctagatattgcccaatcgctgcccacagtgcacatacctttccaccagtcacatgtgagagggcagattttccaaatgctcatcaccacttggcactgtgtggactataattttggccagttaggaaatggcatctcattgttttcatcttaatttgcgtcagcctgattactcattgaaacttgtgaggttgagaaacttttcttaagcttattggccattcaagtttcctcctttatgaaatggttgttcatgtcatttgctcattttt

SEQ ID NO: 84 - DNA, 300 bp, Homo sapiens
cccactgcccccggtcaacaaacccacttttatgacagttttcttccgcagcttggctcttaaattttactggcaggtgtatggttgttggagggttcctagtgagttgggggacctggcaatagagctgcttggttggaggaagtgaagctggcttagtaccagcagctgatctcttccacgtgctgctgctttttttgccactctgatactaaaccagagaaagctgcaggtggataaagaagctgtggctgttttttgcttttgggtggcaatgagaaagagtcacagtgtgggtta

SEQ ID NO: 85 - DNA, 300 bp, Homo sapiens
ctgggagccaccaacatagcagattaccatgtgaagttgccactgctgcatctcctgaaacctggctgatgggagaggtctcattttgtgtctgagaatgtccaggttgtctgcagaccacagcactgatttcccattagcagttattatttcctggccatttcttcctgaaggttttgtggttaaactccctgtcctcaatattttatcagcagtagggctgtcattcttctggttatcaacctctacattatgaagtaaggttcaacccttctgcttttctcaggcccccaaaacggt

SEQ ID NO: 86 - DNA, 300 bp, Homo sapiens
agaacattggtgtgtgagtgttttttgatggtgcaggacccggaggtgctttccttgccaagaatagaaacatccagaatgctcctccccatcccccaatcccagacagcaattatgtcagccctgtaaggcattgcctgctcttgaccctttggcccatctttttatttttaaaaaattcccatgtcacagatgccctgtctatgcagagggtggcgtgggatgggtgaccactaagtttaggctggtgaaggtggtgagcccttctgaggccctgatagaactttccaggagttcatg

SEQ ID NO: 87 - DNA, 300 bp, Homo sapiens
ctccaaggaaaatccacctcgcagcttgtaaatctacagcctgattacatcaaccccagagccgtgcagctgggctcccttctcgtccgcggcctcaccactctggttttagtcaacagcgcatgtggcttcccctggaagacgagtgatttcatgccctggaatgtatttgacgggaagctttttcatcagaagtacttgcaatctgaaaagggttatgctgtggaggttcttttagaacaaaatagatctcggctcaccaaattccacaacctgaaggcagtcgtctgcaaggcctgc

SEQ ID NO: 88 - DNA, 300 bp, Homo sapiens
ctgaaacaaaagatgtatttcaattaaaagacttggagaagattgctcccaaagagaaaggcattactgctatgtcagtaaaagaagtccttcaaagcttagttgatgatggtatggttgactgtgagaggatcggaacttctaattattattgggcttttccaagtaaagctcttcatgcaaggaaacataagttggaggttctggaatctcagttgtctgagggaagtcaaaagcatgcaagcctacagaaaagcattgagaaagctaaaattggccgatgtgaaacggaagagcgaa

SEQ ID NO: 89 - DNA, 300 bp, Homo sapiens
ggggacatgtgtccctcagctcagcagaggctgtggtacaacatggtccttggtgaagacctgcacccctggaacctcccaccatcgtcacaactgtagtctcatttgcagtggagaaaagaacccgatgtcccacagccagatatacacccagctccatgccagcccttcatgtttaccttttgctttgttaattacatgtcagactcctagagggcctccagactaataggaagcatttctgtaaccaacctgccacccactgattcagaaatggaaatcacattccacaatctatgg

SEQ ID NO: 90 - DNA, 300 bp, Homo sapiens
ctcatacagaaagtcagatcaacaaagagtccaagaaaaatgcgacccagctagaccatttgatcccaggcttagcacacgattgcatggcatcccctttagccacttcaaccactgcagacatccaggaagctggactctctcctcagtccctccagacttctggccaccacagaatgaaaaccccattttcaactgagctatctttgctccagcctgatactccagactgtgctggagatagtcataccccactggctttttccttcaccgaggacttggaaagttcttgtttgctag

SEQ ID NO: 91 - DNA, 300 bp, Homo sapiens
aatgcaaagggctgcagttctcattcaggctactttcaggatgcacagaacatatattacatttcagacttggaaacatgcttcaattctaattcagcaacattatcgaacatatagagctgcaaaattgcaaagagaaaattatatcagacaatggcattctgctgtggttattcaggctgcatataaaggaatgaaagcaagacaacttttaagggaaaaacacaaagcttctattgtaatacaaggcacctacagaatgtataggcagtattgtttctaccaaaagcttcagtgggc

SEQ ID NO: 92 - DNA, 300 bp, Homo sapiens
aagatatgcagagatattccaggatcttttagctttggtgcggtctcctggagacagtgttattcgccaacagtgtgttgaatatgtcacatccattttgcagtctctctgtgatcaggacattgcacttatcttaccaagctcttctgaaggttctatttctgaactggagcagctctccaattctctaccaaataaagaattgatgacctcaatctgtgactgtctgttggctacgctagctaactctgagagcagttacaactgtttactgacatgtgtcagaacaatgatgtttct

SEQ ID NO: 93 - DNA, 300 bp, Homo sapiens
cgattcgccagttctccattctgagagtcaatcacgttcctgataggttgtcattgatttttttcttcgttggttttaaccttctaaacatctccaggccactttcttagcctttttctaggtactaaaaagaggtcctacccacacctgcctcacacttctcctttccaaggctgcctgagtttggaggggcttgggtgtgtgtgaacaagggccctgcattgtctaggcctgcagttcccaggcttgggttcactttcaccatgcattggcaaaactagaaaagtaagcttgtgacaa

SEQ ID NO: 94 - DNA, 300 bp, Homo sapiens
tttgtgcctgagcacccacaatttcaggatttagactgtgtggcacctcagctttcctctggatgtaaccactccttggtgagagagggaactcctcaccaatcccatttgacaaaggctaggcaatcttcattctgcttggctttagtcattcttgtcattgggctgcagaagaaaaacaactttgctgggtgatcccactgccttgatttcacctcggagcgaggctgggccatgtccaagtcttatgaggtcaccctgactagaaaaaattgaactcacctacaaatagtctgaaag

SEQ ID NO: 95 - DNA, 300 bp, Homo sapiens
gtgagtccgagcatcagtggcttctggagcagaccagccacgtggaagagaagccttacagagatgggtcggcagagccctgctgatggctgggccttgtgggcagccactctgtgtgagcagggtgttgggcccatacacttcaaagaccagagccctgcactgggagagtgctcctggcccaggctgggaatcacctttcgaggcccttcagactctggcggggcttgctgtggcctccctccagctagtggtgtggctgagcagactccagggccagggccagttcccttctcccct

SEQ ID NO: 96 - DNA, 300 bp, Homo sapiens
acaactccagacataattaaagactggcccaggaggaagagggcggtgggctgtggcgccggctcctcttccgggaggggcgaggtcggtgcagaccttcctgggagcctgtcactgcttgagacagagggcaaggaccacggccttgaactcagcatccacaggacgcccatcttggaggattttgagctcgagggagtgtgccagctcccagaccagtcgcctcccaggaacagcatgcctaaggccgaggaagcctcttcctggggacagtttgggttgagttccaggaagagagtc

SEQ ID NO: 97 - DNA, 286 bp, Homo sapiens
  misc_feature (1)...(286): n = A,T,C or G
gtccagggcccangttttaatttntttttaaaaagctttaggtcttgccgggacggtggttcacncnnnnnnnnnnnnnnnnnnnnnaggcctaggcgggtggatcacaaggtcagcagttcaagaccagcctgaccagcatggtgagaccctgtctctactggaaatacaaaaaaattggctgggcgaggtggcaggcacctgtggtcccagctacctgggaggctgaggcgggagagtctcttgaaactggaaggcagaggttgcggtgagccgagattgcgcc

SEQ ID NO: 98 - DNA, 300 bp, Homo sapiens
caccatttttattttgatgcttacactcatttattctgtttttgtaaaacagtttcgggaatttaaaaatccttccagttaatagagcttttgttattatattataattttgtaaacccactttgtttttcccactttaaagccacagggtcgactcatggatgatacctctattgctgctgcatgatgttcaagaccggcccttggctgttgttacagagatgttgggcagagctatgcaggtgtttcattgtgaactctagctttgatcatggtaaaaagttaaccctttctattttt

SEQ ID NO: 99 - DNA, 300 bp, Homo sapiens
agcctcgcctgggccggcctgtggctcccattttcctttcagcgggacaaaggggacttgttaccaggccattttctggatggcctgtgagatctctgcccctccaagaccctccaagtctgagcctgacccacagctgggacactgaattcagccctgggaaccatgggggcttctatctggcaccaggctgcagcctccccaatcccagcccactttgctgtgtctctggcgggctgtcctccttggtgggagctgtcctgcacactgtaggatgcttaaaggtatccctggcctcca

SEQ ID NO: 100 - DNA, 300 bp, Homo sapiens
tccaaccctggcgatgtcaccagcatggtggctcaggttagagctctctgaggacccagcatagagcactggtgccagggaccaaactgagaccccaccaccgtcatcaacacttacataccataaaggtcttcagagtgccttggccctagacctcccttcattctttgtagagatggaatctaagaatgaaacatctccactcagtcctgcaaatatggaagttcttgagatacctttttttggtagatacttgtgctggtattctgagagtcactttactctgatggtttgcaagat

SEQ ID NO: 101 - DNA, 300 bp, Homo sapiens
gtgtttcttctacctcccctgcacaacattgtttatatgccccctaaaatgtaacttctttagattctgttgttacgtgcaacactgtatatctctccatagcacttaatcagagtttgtaattaggcatctttttgtgtgattatttggtaaatgtccatatcccctactagcctataagctccatgacttctaggtaccctgtctgactacgtgtatcactggttctaccgcctaacattgcctagcacattcattgcttcacaggcatctgaatatgggtttataaaatacattgct

SEQ ID NO: 102 - DNA, 270 bp, Homo sapiens
  misc_feature (1)...(270): n = A,T,C or G
cctggccctgctgcccctcctgaatctcgtatgatggtcacagtccggtggccgtgggggtgctctgccttccctggtccccactgcccatatctgtggactgccccttccaaagacccctggaggaggtgtnnnnnnnnnnnttnntgnncccactaccntgcactgaactggccntgttacancaannactgnncccnnttgttatnacacctntnacaaacacctgctgctgtacatgncnctactttaaggactnnanacctgtgc

SEQ ID NO: 103 - DNA, 300 bp, Homo sapiens
gctggagcacgctggagaggccatccctgccctggcagccgcggctgggggagactcctttgccccattctttgccggtttcctgccattattggtgtgcaagacaaaacagggctgcacagtggcagagaagtcctttgcagtggggaccttggcagagactattcagggcctgggtgctgcctcagcccagtttgtgtctcggctgctccctgtgctgttgagcaccgcccaagaggcagaccccgaggtgcgaagcaatgccatcttcgggatgggcgtgctggcagagcatggggg

SEQ ID NO: 104 - DNA, 300 bp, Homo sapiens
ctcgcgtctcttcactgcacattgcaatgcatttgcgattcccatttctctgctaggagccagcctgggtggcgctgctcccagagccgtgggtcccagaccttgcgttccttttgttcctgtccgtttatcaggacacgggccccacctgtcacgtgcccgaggccacccaagcccagcctgcggggcgttcccactgcctggatgccggcttgagttctgcgcacgcaggattcagtgtggggacggcccctgccggataggcctagccctggcccaggtggtgagcggtttgcagtg

SEQ ID NO: 105 - DNA, 300 bp, Homo sapiens
gggcactgtggggctctccccgcctctcctgccttgtttgcccctcagcgtgccaggcagactgggggcaggacagccggaagctgagaccaaggctcctcacagaagggcccaggaagtccccgcccttgggacagcctcctccgtagcccctgcacggcaccagttccccgagggacgcagcaggccgcctcccgcagcggccgtgggtctgcacagcccagcccagcccaaggcccccaggagctgggactctgctacacccagtgaaatgctgtgtcccttctcccccgtgcccct

SEQ ID NO: 106 - DNA, 300 bp, Homo sapiens
gctcaacgcctatgtgacccatctccatgccgaatacaatcgacagaaggacatctacctagcacatcgtgtggcccaagcttgggaattggcccagttcatccaccacacatccaagaaggcagacgtggttctgttgtgtggagacctcaacatgcacccagaagacctgggctgctgcctgctgaaggagtggacagggcttcatgatgcctatcttgaaactcgggacttcaagggctctgaggaaggcaacacaatggtacccaagaactgctacgtcagccagcaggagctgaa

SEQ ID NO: 107 - DNA, 300 bp, Homo sapiens
tgtgagtttcctatctgttccagactagtatcgccaatctctcccagctctcttctttcctccctggcctttgtcctgcaggaggtagcatcacctcttggcattttgtacatgcttttaaacaattggaggagctgcccaggcagttttatggcctcctggttgtgtgccttcacacccgcctacagccccacctcaccatcaagcgctgagccaatgcgggtgtggctggccctgagttcctgagtcagctccttgccagggccagagctggtaacagcggggcagcagggtgggtag

SEQ ID NO: 108 - DNA, 300 bp, Homo sapiens
aggttgctcacctgaaggagcacaggagggttttccaggccatgtggctcaggttcctcaagcacaagctgcccctcagcctctacaagaaggtgctgctgattgtgcatgacgccatcctgccgcagctggcgcagcccacgctcatgatcgacttcctcacccgcgcctgcgacctcgggggggccctcagcctcttggccttgaacgggctgttcatcttgattcacaaacacaacctggagtaccctgacttctaccggaagctctacggcctcttggacccctctgtctttcacg

SEQ ID NO: 109 - DNA, 300 bp, Homo sapiens
cacaaggagaagaaagttaattaacattgaaagatgagaagacatcttggaagaacttgaattgggccttggaagaagaacagccattcaaatagatagaattgtggtagcaaaggcatagaggtaggaaagtatagatctccagggacagtagtcatggggttggggcactgttggaatttaaggttggaaggatatattggagccccttgaatacggtaacaaggcacaccttgggcagtggagagttatcagagtgtttgaaaaggagggttattgagtaaataaatagactggtac

SEQ ID NO: 110 - DNA, 300 bp, Homo sapiens
gacaccccagatgcagccaccaccagcagaagcgatcagctgaccccacaagggcacgtggctgtggccgtgggctcaggtggcagctatggagccgaggatgaggtggaggaggagagtgacaaggccgcgctcctgcaggagcagcagcagcagcagcagccgggattctggaccttcagctactatcagagcttctttgacgtggacacctcacaggtcctggaccggatcaaaggctcactgctgccccggcctggccacaactttgtgcggcaccatctgcggaatcggccggat

SEQ ID NO: 111 - DNA, 271 bp, Homo sapiens
  misc_feature (1)...(271): n = A,T,C or G
cctggccctgctgcccctcctgaatctcgtatgatggtcacagtccggtggccgtgggggtgctctgccttccctggtccccactgcccatatctgtggactgccccttccaaagacccctggggggggtggggnnttccttctannccnntacnctatgtgtttaatnnncntantnctttantantatttnccantgntnntnatatnnttnnanananncntncttannnacattattttanntangngatnntaccttnntgnaang

SEQ ID NO: 112 - DNA, 300 bp, Homo sapiens
gttccctcaccttattcctccaagttcccccttgggaacctctgagattaacttgataagctccttgggcaagctctttatcctaagattcctcagtgagccttatagagttgctgcgagaattacatttgttcatgatgtcaagtgtctggtatgtagctaatgcttattgaacacatagtaatttattgaataattgtcatgatcactggatgagatatagccactgtggaggtaggcacaccagggttttagaggcttgggatcttgcaacaggattttcctcttgcctctccaaac

SEQ ID NO: 113 - DNA, 300 bp, Homo sapiens
cccacatgtaccaggttgagtttgaagatggatcccagatagcaatgaagagagaggacatctacactttagatgaagagttacccaagagagtgaaagctcgattttccacagcctctgacatgcgatttgaagacacgttttatggagcagacattatccaaggggagagaaagagacaaagagtgctgagctccaggtttaagaatgaatatgtggccgaccctgtataccgcacttttttgaagagctctttccagaagaagtgccagaagagacagtagtctgcatacatcgctg

SEQ ID NO: 114 - DNA, 300 bp, Homo sapiens
acagttagtgtaaaggatctgaatggcatagacttaactcctgtgcaagatactcctgtggcttcaagaaaagaagatacatatgtacattttaatgtggacattgagctccagaagcatgttgaaaaattaaccaaaggtgcagctatcttctttgaattcaaacactacaagcctaaaaaaaggtttaccagcaccaagtgttttgctttcatggagatggatgaaattaaacctgggccaattgtaatagaactatacacgaaacccactgactttaaaagaaagaaattgcaatta

SEQ ID NO: 115 - DNA, 288 bp, Homo sapiens
  misc_feature (1)...(288): n = A,T,C or G
gtgatctgcctgccttggtctcccaaagtgctgggaatacaggcatgagccaccgcactcggccaggagctagttttatcagcatcctgctccactgccttcctctagtgcagcctggaagacatggcagcgggtagctcctggggctgagccagaagcatcactgcagtgaaagtctctgcttacctgtctggctcagcttgggcaagggctgggccatatgtgctcagggacgtgcttctcttgtaaggcaggaggatanaanaggaccannaanggngggagctg

SEQ ID NO: 116 - DNA, 300 bp, Homo sapiens
tcaattagtaacatctgaaaaaacagctttgtcctgggtgaaaaaggatgccaaaattgcctggaaaagagcagtgagaggagtccgggagatgtgtgatgcatgtgaagcaacattgtttaacattcactgggtctgccaaaaatgtggatttgtggtctgcttagattgttacaaggcaaaggaaaggaagagttctagagataaagaactatatgcttggatgaagtgtgtgaagggacagcctcatgatcacaaacatttaatgccaacccaaattatacctggttctgttttgac

SEQ ID NO: 117 - DNA, 300 bp, Homo sapiens
gcactttccagaattctctcatatttgtgggctgggatcaagcctgcagcttgaggaaagcacaaggaaaggaaagaagatctggtggaaagctcaggtggcagcggactctgactccactgaggaactgcctcagaagctgcgatcacaactttggctgaagcccctgcctcactctagggcacctgacctggcctcttgcctaaaccacaaggctaagggctatagacaatggtttccttaggaacagtaaaccagtttttctagggatggcccttggctgggggatgacagtgtggg

SEQ ID NO: 118 - DNA, 300 bp, Homo sapiens
agaacgttctcaggttgaccagctgctgaatatttctttaagggaggaagaacttagtaagtcattgcagtgcatggataacaatcttctgcaagcccgtgcagcccttcagacagcttatgtggaagttcagaggctacttatgctcaagcagcagataactatggagatgagtgcactgaggacccatagaatacagattctacagggattacaagaaacatatgaaccttctgagcacccaggtttggcatagaaatggtaccccttgttcaaaatgaacaagaagccttagatttg

SEQ ID NO: 119 - DNA, 300 bp, Homo sapiens
gaacaaagaaggaatgtcttcctcatgtttgggtctatagaagacgttaaagaaaacttccagaaagtgggtttgaggcatgagccaccacgcctggccaaaggatttaatgaattaatggatgtacagtgctggggctggtattctagggcctgcattgagactcacattttgccatcaaaagccttttaagaggtggaggttgcggtgagctgacatggtgccactgcactccggcctgagtgacagagtgagactctgtctcacaaaaaaaataatgccctttaaataatgaataat

SEQ ID NO: 120 - DNA, 273 bp, Homo sapiens
cctcagccttctaaaaagctggggctacacccagctgaagaaattgtaactaaagatagattgtttaaagcaaagcaagaaacttctgaagaaatggaacaaagtggagaagcctcaggaaagcccaacagagagtgtgcaccccagattccttgtagtactcctattgctactgaaaggacagttgcacatttgaacactctgaaggaccgtcacccaggtgatttgtgggcccgcatgcacatctcatcccttggaatatgctgcaggaga

SEQ ID NO: 121 - DNA, 300 bp, Homo sapiens; identical to SEQ ID NO: 118

SEQ ID NO: 122 - DNA, 300 bp, Homo sapiens
gttgcaagcagccttggaatagtaactcttctcatttgtttgggatctggccaccaagttccagaatgatacacggatcagtgcagaagttcatcaggctctcggaccttagggctgttggagaaggcttcagcagcagaactgatggtgaaggctcgtgttctccatcctcaactttctttgcttcgatcatacacaagaatacatttggaagggcaaaaaaatgaacactgtcgttcattgcagccgtgttttgtgacacagatgcacagtctgctgtgaagaccttctctcaagtgg

SEQ ID NO: 123 - DNA, 300 bp, Homo sapiens
gtgatttcagcttccaaactggtatacattccaaactgatagtacattgccatctccaggaagacttgacggctttgggattttgtttaaacttttataataaggatcctaagactgttgcctttaaatagcaaagcagcctacctggaggctaagtctgggcagtgggctggcccctggtgtgagcattagaccagccacagtgcctgattggtatagccttatgtgctttcctacaaaatggaattggaggccgggcgcagtggctcacgcctgtaatcccagcactttgggaggcca

SEQ ID NO: 124 - DNA, 300 bp, Homo sapiens
catgctggccagcatccctgcctgtgcaagctctggatgagctgtgagcccctgccacccacacccccactccctgccagcctggcctcagggcctctgatccatgtgcactggagaggagatgactgacagggccactggggcatttccacgttaacagcagctgccactggcaaaagaagtgactcgccaatggaggcatctcagatgtgggcccaggagtctggggagctactttgaacagggctatccattcattgtcccaccaaaggctatggagcccacccaccatgtgctgga

SEQ ID NO: 125 - DNA, 300 bp, Homo sapiens
ggtaaattggttgaattattgtattgaagcttgagctgtagctaaaagtaatttaggtttcccctaagatgttattatgttagggacataacacttttgggaggttgttgtgggagatggttgatttaggttttcaaaagctagaaataaaatttacatgccttagatttcataaaattctgctctaattgggtggaaggtgctgtatctaacttgtgttcctcctaaggttatgtcctaataactattcttttaggagtatacttctactttatagaaggttgcttttctttttaattt

SEQ ID NO: 126 - DNA, 300 bp, Homo sapiens
tgaagaggagatcggtgacctgggctccttatgtgcctgaaagagtttgagtttcctgttaactccaaatcaacagtattttcaacaagaaatgtgcaattgaaatcaagtgctgtttaagtgcagctaggatttccacaggaagacacttgcagtgaacagagttatggagcagcaaaaacacagatctatttggaaaaagagaaaacatatgcgttgtattttgcttcaattataaaataccatcctctcaaaggtggttctaaattacaaaggactttgatttctaggtagattctg

SEQ ID NO: 127 - DNA, 300 bp, Homo sapiens
ggtgattcccatgctgaacagtttgatctcctgccagagtgtcgggccacaaactgggcagcacatcaggatcacctgggggccttcaaaaatcaaaaatccacccccaggccatgccctggacccactgcaccaggacaagaaatccaccccaggcctctccccagacccactgcaccaggacaagaaatccacccccaggccacgccccagacccactgccctaggatgtgggggtgggaaccaggtggtgctttgtaaagacgtgcaggtggtaaccccaggcccccacgctcggaa

SEQ ID NO: 128 - DNA, 300 bp, Homo sapiens
tgagctgggagaaggggagaaagtttgtgaagaggagatcggtgacctgggctccttatgtgcctgaaagagtttgagtttcctgttaactccaaatcaacagtattttcaacaagaaatgtgcaattgaaatcaagtgctgtttaagtgcagctaggatttccacaggaagacacttgcagtgaacagagttatggagcagcaaaaacacagatctatttggaaaaagagaaaacatatgcgttgtattttgcttcaattataaaataccatcctctcaaaggtggttctaaattacaa

SEQ ID NO: 129 - DNA, 285 bp, Homo sapiens
  misc_feature (1)...(285): n = A,T,C or G
ggaaagcacaaggaaaggaaagaagatctggtggaaagctcaggtggcagcggactctgactccactgaggaactgcctcagaagctgcgatcacaactttggctgaagcccctgcctcactctagggcacctgacctggcctcttgcctaaaccacaaggctaagggctatagacaatggtttccttaggaacagtaaaccagtttttctagggatggcccttggctgggggatnnnnnnnnnnnnnnnnnnnnnnnnnnnaggaagataccatttcttgacgg

SEQ ID NO: 130 - DNA, 300 bp, Homo sapiens
ccggacgcaggccctcgggcaggagcatctggcagagtggggggcgtggcaggcaccctcctttgcagggcgaggtggggcctctgcagccatcctggacaggccggggtggcggcagctttgcccacgtggaagcggggtgggtctcacttgcgtggtggcccctggccccatcttgcctgctgcggcctggggagcaggcgctgggtggtggttctgcctgcttgctgctcgttccccgggcatgcgtgggcagcggggggcatgcgtgggcagcagggggccgtgggcagcgggggc

SEQ ID NO: 131 - DNA, 300 bp, Homo sapiens
gatctctatactagtgaacagtgccagttccacactttggacttagaactgttctctagttattgtaacacagaatactgtcaatccctaatttacttaatgttacttattggaagtggggctgatgaaatacgcacaggagggaaatctactgtgtttaggcacaggcagccccagtgtataaggagatcatattccaaaaggttgtcagttggttgtttgcaacctggaatgtattttcctttagagaccaggttatccatggtggttaggcccctagagcagctggaaaagatgatc

SEQ ID NO: 132 - DNA, 300 bp, Homo sapiens
ctcccatggaggtggtgggaatggcaccgagaagtttgatgacagttatctaatggactagaggttggcaaactttctgtaaatggccaggtagtaaatagttctgcttttgaaggcatatggtctcttgcacctactcgaggctgaaagcagctatagacaatacataaatgaatgagcgtgagtgtgttccaataagaaaaaaacatggctgtttgcttcggccccagggttgtagcttaccagtcctgtaacagatcacagtttgctcttttggtcacaaatacttgaacccctccc

SEQ ID NO: 133 - DNA, 269 bp, Homo sapiens
  misc_feature (1)...(269): n = A,T,C or G
atgctatgccaaagcctgctgccagctccatagcctggacctacagcactgcatggtggagtccacagctgtggtgagcttcttggaggaggcagggtcccgaatgcgcaagttgtggctgacctacagctcccagacgacagccatcctgggcgcactgctgggcagctgctgcccccagctccaggtcctggaggtgagcaccggcatcaaccgtaatagcattccccttcagctgcctgtccaggctntgcaaaaaggctgccctc

SEQ ID NO: 134 - DNA, 300 bp, Homo sapiens
gatggatgagactgttgctgagttcatcaagaggaccatcttgaaaatccccatgaatgaactgacaacaatcctgaaggcctgggattttttgtctgaaaatcaactgcagactgtaaatttccgacagagaaaggaatctgtagttcagcacttgatccatctgtgtgaggaaaagcgtgcaagtatcagtgatgctgccctgttagacatcatttatatgcaatttcatcagcaccagaaagtttgggatgtttttcagatgagtaaaggaccaggtgaagatgttgacctttttga

SEQ ID NO: 135 - DNA, 300 bp, Homo sapiens
ggcgagcgggaacagctcttgaggagtgagactgcaggagatgtgggccgtgccaaagagatggatgagactgttgctgagttcatcaagaggaccatcttgaaaatccccatgaatgaactgacaacaatcctgaaggcctgggattttttgtctgaaaatcaactgcagactgtaaatttccgacagagaaaggaatctgtagttcagcacttgatccatctgtgtgaggaaaagcgtgcaagtatcagtgatgctgccctgttagacatcatttatatgcaatttcatcagcaccag

SEQ ID NO: 136 - DNA, 300 bp, Homo sapiens
gacttctaaatatatcttggatataataggtgataagttctgtcaattagtaacatctgaaaaaacagctttgtcctgggtgaaaaaggatgccaaaattgcctggaaaagagcagtgagaggagtccgggagatgtgtgatgcatgtgaagcaacattgtttaacattcactgggtctgccaaaaatgtggatttgtggtctgcttagattgttacaaggcaaaggaaaggaagagttctagagataaagaactatatgcttggatgaagtgtgtgaagggacagcctcatgatcacaa

SEQ ID NO: 137 - DNA, 300 bp, Homo sapiens
ttgacaaattgctggaacacacttattgtggtttacccggttttaattatgtcagagattgcatcatccttatgcttgtttacatctataatcttctatgaaatggtggtaccaaggggcgcccaacagcttttatccccattcttagagcatattctttattataatgattatccaacatatttctttaattttaatacaaaaaatacatcatttaatttttgttacatatgaacattcatttttaaatgctcagcctcaagtgcaggcatttttgagtggcctgattacatattcctc

SEQ ID NO: 138 - DNA, 300 bp, Homo sapiens
ggaaggggagggttggtgagtcccagaccttaaaaatacaaggttaagagggaccccaaagcaaaaaattccaacccttttcctcccagtcattgaaacaccaaaactattataccggagggtgtaatagttttgctgcccagttgtggtaggccagtagtggcctcccaagatgcccatgtcctaatcccaggaacctgtcaaaattaccttgtatggccaaaggggctttgcagatgtaatgaagttaaggatctttcgccaggaagattatcccagcttgttcaggagggcttgatg

SEQ ID NO: 139 - DNA, 300 bp, Homo sapiens
gacatcattttcttattctagtaagagaaagtacacagattcaactttagagaggacttttttttttctggagctaaatcaaggaaggattatcacgtggcctcccttgaatataattttgaagctgtgaacagtaccatcagtaacattttatggacagctctgatggtttttataccacggcactcttcttacctttgggggaagctatctggagttatgactgatgtgtaaagtggtttactgttagaatcctggtgtgctaggattctgggagagtcactttcaggaagttacctg

SEQ ID NO: 140 - DNA, 300 bp, Homo sapiens
gctgcccaggcagttttatggcctcctggttgtgtgccttcacacccgcctacagccccacctcaccatcaagcgctgagccaatgcgggtgtggctggccctgagttcctgagtcagctccttgccagggccagagctggtaacagcggggcagcagggtgggtagcctctaccagccagggcagtccctgaggggccagcaggggggctgactgcctagtggctcaacctcctgaacccacccactcccagcgatgctacccagaaccccaacggcatgaatcctgcacagtgccggg

SEQ ID NO: 141 - DNA, 300 bp, Homo sapiens
cccaaacttatcgggggtgccagaggcagagtagacaagccttagtggccgccatttgttgaatatctactgtgcgccaagcagtgcgtcacaactttatgaagtaggtattattatcatccccattttacaggtgaagaaactgagtctctgagagaccaacttttccaaggtcacacagaggtgggatccagcccacttccgtctgaccccaagcccctgctgttaacccctgccccattgtggggaggttccggcccactctggagttctctggtctgcgtcagtcctcaggagaag

SEQ ID NO: 142 - DNA, 300 bp, Homo sapiens
gaaaggtggcgcgcttctcacggctgagttgctgcgcctgcagacggaagctccccacaggcagagctgcttggatgtgtgagtcatgaagccagagaagccccgctccatgagcagtgactccccaggccctgtgacctccctcctgtcttgcagctcctcctggcaccagtccccagggctctcctgttggtagttcctgcttttcttcttggaaattcctcgtggacctcgagatctttaccctaaaatagttctgttgaatttcaccctggcaatgtaaattgatagcttatcttc

SEQ ID NO: 143 - DNA, 300 bp, Homo sapiens
cttggccttgcttctctgagaaaactttggtcacacctccagagccagggtgggtgcctccctggaggagggggctttcctggttggtggcacagcaggagtccaggctttgtaccgtggacaccatgggctatggcaacaccttcctcaccatccttccatgaggacctcgggagagagtggacatgaaaccctttgtgctctgaagcattcaacagaagctttctggttctgtgcctatttctttggcacttgagcgtgtttgcaggttcattacacacatgatgaaagctctggccc

SEQ ID NO: 144 - DNA, 300 bp, Homo sapiens
cctgactgagtgcctgacggtggaccccctcagtgccagcgtctgaaggcagctgtaccctaagcacctgtcacagtccagccttctgctggagcacttgctcagctcctgggagcagattcccaagaaggtacagaagtctttgcaagaaaccattcagtccctcaagcttaccaaccaggagctgctgaggaagggtagcagtaacaaccaggatgtcgtcacctgtgacatggcctgcaagggcctgttgcagcaggttcagggtcctcggctgccctggacgcggctcctcctgtt

SEQ ID NO: 145 - DNA, 300 bp, Homo sapiens
  misc_feature (1)...(300): n = A,T,C or G
gccagagcctagaggagagatcaaagaccctggccgaagtgaagcccattctgcaagcaactgggttcccatggcatgtggtggccttagaggaggtgttcagcctgccaccgtcggtgctttggtgctctgcccaggagctggtgggatccgagggggcctacaaggcggccgtggacagcttcctccagcagcagcatgtgctgggggccgggggtggtcctggnccgactcaaggggannnnnnnnnnnncncaacccccgctggacccccngaanctggcaagaccngctgcccct

SEQ ID NO: 146 - DNA, 300 bp, Homo sapiens
tgactttgtacctggtccaagctgttggggaattgctgctgttgacccaggcaggagtctgactagagaacaaactaaggttgctgcaacaaacaaggacctcttccaagaagggctcccaggcctggcgcagtgactcatgcctgtgatcccagcacttgggaggccgaggcgggtggatcatttgaggccaggagttcgagaccagcttggccaacatgatgagaccccgtctctattaaaaatacaaaaattagccaggcgtggtggcgcctgtagtcccagctactcaggaggttg

SEQ ID NO: 147 - DNA, 295 bp, Homo sapiens
  misc_feature (1)...(295): n = A,T,C or G
ggnaangcnanngnaggaganagagaagnancagtnnagncccangaaacccnntgaaacccttagaagncagaggagngaaaggangaaaaananggnnggangagaacnnannnnggncaaannaagganganngntaggngngaaaaanaanaacaaanggggaaaangggaaaaaaggcganaaaggnaanannagnanaaggnggaananannnnannagaaaggncaanaaaagaagnacaaagaaaaanganaanaagnaannannananngacagagacaagaagga

SEQ ID NO: 148 - DNA, 300 bp, Homo sapiens
cgctgtgcttgagaccaacctgacgggtaccttctacatgtgcaaagcagtttacagctcctggatgaaagagcatggaggatctatcgtcaatatcattgtccctactaaagctggatttccattagctgtgcattctggagctgcaagagcaggtgtttacaacctcaccaaatctttagctttggaatgggcctgcagtggaatacggatcaattgtgttgcccctggagttatttattcccagactgctgtggagaactatggttcctggggacaaagcttctttgaagggtcttt

SEQ ID NO: 149 - DNA, 300 bp, Homo sapiens
agtgtcagttttcctaatctcagtccaggtaggaattaagaaatatctcaagtgttgatgctatccaagcatgttggggtggaagggaattggtgcccagaaaatgggactggagtgaggaatatcttttcttttgagagtacccccagtttatttctactgtgctttattgctactgttctttattgtgaatgttgtaacattttaaaaatgttttgccatagctttttaggacttggtgttaaaggagccagtggtctctctgggtgggtactataatgagttattgtgacccacagc

SEQ ID NO: 150 - DNA, 300 bp, Homo sapiens
tgtagactttatgtcagttctgtgtagactttatgtcagtttttgtcattatttgaaaatctattctgacaactttttaattcctttgatcttataagttaaagctgtaacaactgaaattgcatggatcaagtaagcatagttttatccagggagaaaaataaaaggaagccatagaattgctctggtcaaaaccaagcacaccatagccttaactgaatatttaggaaatctgcctaatctgcttatatttggtgtttgttttttgactgttgggctttgggaagatgttatttatga

SEQ ID NO: 151 - DNA, 300 bp, Homo sapiens
gcgggcccggccagcggaagcccctgcgcccgcgccatgtcaaagaaaaaaggactgagtgcagaagaaaagagaactcgcatgatggaaatattttctgaaacaaaagatgtatttcaattaaaagacttggagaagattgctcccaaagagaaaggcattactgctatgtcagtaaaagaagtccttcaaagcttagttgatgatggtatggttgactgtgagaggatcggaacttctaattattattgggcttttccaagtaaagctcttcatgcaaggaaacataagttggaggtt

SEQ ID NO: 152 - DNA, 300 bp, Homo sapiens
gatattcacacagtatgtattatattaaccatatcacacttaagttattaaattcagactatttgtaacttattgttatagggcctgccgtatggcttaggatatttgagtaatcatatatttaaagtaaaaactttgggctgggcacagtggctcacacctgtaatcccagcacttggggaagctgaggtgggcagatcagttgaggtcaggagttctagaccagcctggtcaacatggcgaaaccccatctctactaaaaatacaaaaattagctgggcgtggtggcacacacctgta

SEQ ID NO: 153 - DNA, 300 bp, Homo sapiens
cagagaccagccttctccagaggctgtcactgcaggagccgtgggcctgggaagacttggaagcggcctctctcaactggtttctgtctccgtggagctggaactgcctgcacttgccttcagagggaggcacagtccacccagatccacctttccagcaagacccccagtggctgcccagcctgggagcacctctttgcttttcacaccaaaccaaaactggcgagagcccctcctagccaccagtgatccccaagcatccagtacagaaccaggcatcgagctagctccctgcacggc

SEQ ID NO: 154 - DNA, 300 bp, Homo sapiens
cttgacctctgtactttaaagaaatcactaaccaaattttcaaagtttccttttaaatgcgtttagctagaaatctatgtatttatccctttcctattttgcattcttctcccactatttttaaaaactcatttacagtagaaaccattcttctttctcccaacagtatcctttgccaagaccatgagaacagtatgggagcatgttgttggtcagggtttcagaatacgcgtgatgtcactgagaatgtttgctcacagtcaataattgtctttgtggatgtgataattttggagatac

SEQ ID NO: 155 - DNA, 81 bp, Homo sapiens
gatcattgttaattagtgacatagtaacatctgtagcagctggttagtaaacctcatgtgggggaggtgtgggaggtttta

SEQ ID NO: 156 - DNA, 300 bp, Homo sapiens
ggcagcacaagtgtgcaaacagctatggaaagtgaactcggagagtctagtgccacaatcaataaaagactctgcaaaagtacaatagaactttcagaaaattctttacttccagcttcttctatgttgactggcacacaaagcttgctgcaacctcatttagagagggttgccatcgatgctctacagttatgttgtttgttacttcccccaccaaatcgtagaaagcttcaacttttaatgcgtatgatttcccgaatgagtcaaaatgttgatatgcccaaacttcatgatgcaatg

SEQ ID NO: 157 - DNA, 300 bp, Homo sapiens
ctggtgaggagtctttgcgagagcgaggagcagcggttactggaacaggtgcatggcgaagaggagcgggcccaccagagcatcctgacacagcgggtgcactgggccgaggcgctgcagaaacttgacaccatccgcactggcctggtgggcatgcttactcacctggatgacctccagctgattcagaaggagcaagagattttcgagaggaccgaagaagcagagggcattttggatccccaggagtcggaaatgttaaactttaatgagaagtgcactcggagcccactactgacc

SEQ ID NO: 158 - DNA, 300 bp, Homo sapiens
cgacagctctccaatactcaggttaatgctgaaaaatcatccaagacagttattgcaagagtttaatttttgaaaactggctactgctctgtgtttacagacgtgtgcagttgtaggcatgtagctacaggacatttttaagggcccaggatcgttttttcccagggcaagcagaagagaaaatgttgtatatgtcttttacccggcacattccccttgcctaaatacaagggctggagtctgcacgggacctattagagtattttccacaatgatgatgatttcagcagggatgacgtc

SEQ ID NO: 159 - DNA, 300 bp, Homo sapiens
agtacccagagttgcgaggagttttttaactgatttagccaggtggcaatcatgagtgaatggatgaagaaaggccccttagaatggcaagattacatttacaaagaggtccgagtgacagccagtgagaagaatgagtataaaggatgggttttaactacagacccagtctctgccaatattgtccttgtgaacttccttgaagatggcagcatgtctgtgaccggaattatgggacatgctgtgcagactgttgaaactatgaatgaaggggaccatagagtgagggagaagctgatg

SEQ ID NO: 160 - DNA, 294 bp, Homo sapiens
  misc_feature (1)...(294): n = A,T,C or G
ctttgagctaggataaaaattgggtaaaggacatttgcttacctgcaaatgaatcactgtggaaatgtgatcttcccatatcatcaagaaacttgttttctggatgaatactgggagaataaaatgagaactctggagtgagctaaattgatcccaattaagtttttctgcttagcagacagaaggtataattttttgacaccctttcccacctggtgcctatgctaggcttgtnctgataacatccctcactnactngatnntcacatngnncttncnctgangtcccatttt

SEQ ID NO: 161 - DNA, 300 bp, Homo sapiens
cttcctcaaagcatggttgctgagtacccagagttgcgaggagttttttaactgatttagccaggtggcaatcatgagtgaatggatgaagaaaggccccttagaatggcaagattacatttacaaagaggtccgagtgacagccagtgagaagaatgagtataaaggatgggttttaactacagacccagtctctgccaatattgtccttgtgaacttccttgaagatggcagcatgtctgtgaccggaattatgggacatgctgtgcagactgttgaaactatgaatgaaggggacca

SEQ ID NO: 162 - DNA, 300 bp, Homo sapiens
gccccgtgtggggagacggacagcaccctcctcatctggcaggtgcccttgatgctatagcgcctcccctctcccctcagagggcacagctgcaggcctgaccaaggccacgcccggctctcgtgctctaggacctgcacgggacttgtggatgggcctggactctccagaaactacttgggccagagcaaaggaaaacctcttgttttaaaaaaatttttttcagagtgttttggggaggagttttagggcttggggagagggaggacacatctggaggaaatggccttctttttaaaa

SEQ ID NO: 163 - DNA, 300 bp, Homo sapiens
gaccggctgggcctacaaaaagatcgagctggaggatctcaggtttcctctggtctgtggggagggcaaaaaggctcgggtgatggccaccattggggtgacccgaggcttgggagaccacagccttaaggtctgcagttccaccctgcccatcaagccctttctctcctgcttccctgaggtacgagtgtatgacctgacacaatatgagcactgcccagatgatgtgctagtcctgggaacagatggcctgtgggatgtcactactgactgtgaggtatctgccactgtggacagggt

SEQ ID NO: 164 - DNA, 300 bp, Homo sapiens
  misc_feature (1)...(300): n = A,T,C or G
aaaatttatangtaatgacaaatgacttatcagtgttcatcatctgaaagctaagtggttcgttcaatcactttttcaaagttgatagtagattgcatggtttcatgtttcctcatattggtttattaattctatttaatcaaggaaaataacttcagattccataaagtttcagtttatttttagtttactactaggtgagatagcacattacatacttttactatcaaatattattttagcagcttcccatagtaccaaatgatttgattccctactctcattttttaaagcatataa

SEQ ID NO: 165 - DNA, 300 bp, Homo sapiens
ctggactctgagtcgtcttggtcccaggagccagtagtgaaggcaacagtctgcccacctgtggacaccagatcctgggagctcctggttagcaagtgagatctctgggatgtcagtgaggctggttgaagaccagaggtaaactgcagaggtcaccacccccaccatgtcccaggtgatgtccagcccactgctggcaggaggccatgctgtcagcttggcgccttgtgatgagcccaggaggaccctgcacccagcacccagccccagcctgccaccccagtgttcttactacaccac

SEQ ID NO: 166 - DNA, 300 bp, Homo sapiens
cttctgttgattggtttgtttaaagtacctaagtactaccctttgactccctaccaaaagttcttttgttttttaaacaacttttatttgtgacttactttcttgagaagtgttcttaatgaattgcataaaatagtggtagcagcttatttcttaagtactttattatttgtgctttaccatttcaggttcttatctttaacccttatttactcagttttccatctgaatgatcctatctctaaattaaggatttaataaatgctgcaaattgtccactttgcaaattgtccaaaagct

SEQ ID NO: 167 - DNA, 300 bp, Homo sapiens
gcgagatgaagctacactgtgaggtggaggtgatcagccggcacttgcccgccttggggcttaggaaccggggcaagggcgtccgagccgtgttgagcctctgtcagcagacttccaggagtcagccgccggtccgagccttcctgctcatctccaccctgaaggacaagcgcgggacccgctatgagctaagggagaacattgagcaattcttcaccaaatttgtagatgaggggaaagccactgttcggttaaaggagcctcctgtggatatctgtctaagtaaggattccatatggc

SEQ ID NO: 168 - DNA, 300 bp, Homo sapiens
gtctgggcagcctacgctttccggataaaaatggcagaatgaaagaattatgagtggaactagagaataggaaagacatgaaccaacgcccaaaatgagaaagaaggacatataaagaaaaagacaaatacaagtgaaaaaaatatactaatggattaacgtccctgtcgagtgacattttctgactatggaaatgatattagacaaaaagcaacttcaagtgggtttcttatttgagttcaaaatgggtcataacgcagcatagataacttgaaacatgaacagcgcatttggcccagg

SEQ ID NO: 169 - DNA, 296 bp, Homo sapiens
  misc_feature (1)...(296): n = A,T,C or G
gagatctctgggatgtcagtgaggctggttgaagaccagaggtaaactgcggaggtcaccaccctcaccatgtcccaggtgatgtccagcccactgctggcaggaggccatgctgtcagcttggcgccttgtgatgagcccaggaggaccctgcacccagcacccagccccagcctgccaccccagtgttcttactacaccacggaaggctggggagcccaagccctgatggccccgtgccctncattgggncccctggctanttcancnagncccncaggtngagnccaaagcca

SEQ ID NO: 170 - DNA, 300 bp, Homo sapiens
gggtgttggagcagattgtagttgatccacagcaaagagcatcaccaaagccattccaggaggaactagatccaccacttcctctgctgggcatgctccaaaaatggttgtggcttccagagaggactccaaaagaaagcacaaaaactagacagtgggagggcatacccaaaagccctgagtttctgaaaaaatattgaaagtttctatggtgaaataggaagttaatgtgcttaggaagaaaaaagtggtaatgattcaaggaaacataatcacacacggttttagttttaatggaca

SEQ ID NO: 171 - DNA, 300 bp, Homo sapiens
atggaggcaccagcaggtagtggcccctgtaagcagggccagagtcgggacaaagagcaggagtgaagcagccaagagacagaggaccaggctggagccagtgggcacgcaggagcctgcctgggaaaagccggggggcaaggctggcatgggaatgaacacctgctggtgacacctctctgagcttcagttcccttaactagaaaaatagaacaggcccggtgcggtggctcatacctgtaatcccagcactttgggaggctgaggcgggtggatcatgaggtcaggagatcaagacca

SEQ ID NO: 172 - DNA, 300 bp, Homo sapiens
ggcggaggagcagaagctcaagctggagcggctcatgaagaacccggacaaagcagttccaattccagagaaaatgagtgaatgggcacctcgacctcccccagaatttgtccgagatgtcatgggttcaagtgctggggccggcagtggagagttccacgtgtacagacatctgcgccggagagaatatcagcgacaggactacatggatgccatggctgagaagcaaaaattggatgcagagtttcagaaaagactggaaaagaataaaattgctgcagaggagcagaccgcaaagcg

SEQ ID NO: 173 - DNA, 300 bp, Homo sapiens
gtctttcccattcacttctctagaaagctgccaagacagaggcagaaagaaatggatgatagttctgtcaagcacacttctgttctcttagaacttagaagtgtttctaagagaacagaagtaataagagaaacagttacgtgtggaattcaacatctttggttggaacgcattggctttttttttcttgttttgatagaaatggaattaagcaaaagtagtttttgtcttttctgttgtcttcaaatttcaggccatctatttttaatttaatcccgttcaagtacttgattgttatac

SEQ ID NO: 174 - DNA, 300 bp, Homo sapiens
attatttccaaagcagcctacagtagaaaatagtcattatggcagcagcttctgatgtttttgtttggtaggttttctgatttcaatatatagaatcatattcatagagtatcttcttttaacgaattgcacaaagtacccatttaaaatttacatgcacagttcattgccacctttcttaggcctatgcatagttaataaggttataatctactcaacatggaaaatggagcctatttgcaaacacacaagtaattaaagtaccaattctctcttagtttctttttttatagttggttt

SEQ ID NO: 175 - DNA, 300 bp, Homo sapiens
  misc_feature (1)...(300): n = A,T,C or G
tgganactctttantatggaaggtgaatttcctgtcaacatagtccaggacaaagcagttccaattccagagaaaatgagtgaatgggcacctcgacctcccccagaatttgtccgagatgtcatgggttcaagtgctggggccggcagtggagagttccacgtgtacagacatctgcgccggagagaatatcagcgacaggactacatggatgccatggctgagaagcaaaaattggatgcagagtttcagaaaagactggaaaagaataaaattgctgcagaggagcagaccgcaaag

SEQ ID NO: 176 - DNA, 300 bp, Homo sapiens
tataaactttattttattctcttctggggtagagttacatgacaagaaattgaattaattcaataaaattttagttcgggttgcttaggtttttactgctcccattcttgcttttactaatttatccaagattagatgtgattactatttaataataatttagtcctcacacttacaaaccacttacaataccagcatgcttctatcactgtaattctattcaattctcaggcccatgaggcatgccagccagacgaccagacagcatttatagagagggcactcaataccagccacaaa

SEQ ID NO: 177 - DNA, 300 bp, Homo sapiens
  misc_feature (1)...(300): n = A,T,C or G
gactggagaagtcagaagtagaaaagcagattgctaggagagacaggatgacagattttggtcagaaaatgggatattggagtttaaagtatcaaatacagaatagttccagatgttcagagatccagcatgggattaggtactgaaatggattagaactaaaagtcactagaatttagaaattgagaaccatgagagtggatgcaatgacttgttgcttgattgaaaaataaattaataataataaaggaccatgagactagcctgttatagggggtatctccatgannnttgtttttc

SEQ ID NO: 178 - DNA, 300 bp, Homo sapiens
tcctggtgtcaaacactataaacctttgaccagctgagctgtgactgctgtcacatatctgagtcctgtgtgcacagtaatatcctgggtcaggtaaaatccaggtcttcaagttttaaggattttttgaagaattcgggcttctttaagacgatccatgcccaaatccacaagcttgttgacagtggattacagtttgtgtggcaaagtccaagttgttacactgtgctttaaaaaaaatcttatctgcatgtattgttaacttagagaccatgagatctatttatcaggaccaggaag

SEQ ID NO: 179 - DNA, 300 bp, Homo sapiens
ctcatgcctgtaatcccagcactttgggaagcagaggtggcaggatcattccagcccaggagttcaagaccagcctgggcaacacagtgagtgagaccctgtctctatttaagaaaaaataattaagaaattttattaaaaaagaagaatcaggaaaccaagtccaacccaactaaacctcaaatgaaccagcccctaacacagatgaggggatttgggactgataagctctgtgctgtgtccatggcccgtcatttatcaaggctgcagctttgtaaatgtggctatttttatgttgtg

SEQ ID NO: 180 - DNA, 300 bp, Homo sapiens
gtgatctgcctgccttggtctcccaaagtgctgggaatacaggcatgagccaccgcactcggccaggagctagttttatcagcatcctgctccactgccttcctctagtgcagcctggaagacatggcagcgggtagctcctggggctgagccagaagcatcactgcagtgaaagtctctgcttacctgtctggctcagcttgggcaagggctgggccatatgtgctcagggacgtgcttctcttgtaaggcaggaggatagaagaggaccaagaagggagggagctgccctgtggtgca

SEQ ID NO: 181 - DNA, 300 bp, Homo sapiens
cccatgccgggatcttcccacacccgtcctcacagatccagccccagccccttgcttcccaggccatctctcagcagcacctgcaggatgcgggcacccgggagtggagccctcagaacgcatccatgtcggagtctctctccatcccagcttccctgaacgacgcggctttggctcagatgaacagtgaggtgcagctcctgactgaaaaggccctgatggagcttgggggtgggaagccgcttccgcacccccgggcgtggttcgtctccttggatggcaggtccaacgctcacgtta

SEQ ID NO: 182 - DNA, 300 bp, Homo sapiens
tttgcagtgttgtcagaaacaaataataaagccccaaaagattaactagttgaaaaaactggcaaaatctgtatacgtggaaatttaccaggacagagactgaagaataaagaaaatgagtttcattgccagatcatgaaatccaaagaaactttaaagaagatgagttgtgtaaatggaactgaagggagggaagagctgccttcgcctgggacaaagaaaacatgtgtatacacatgggtcaagcagtgctggtctgtggctgcctgtccagaggaatggaaatatcccttgtcttta

SEQ ID NO: 183 - DNA, 300 bp, Homo sapiens
cggacccatcggagcgtaacctggatctccgcaggcctggcggaggccggccacctggaggggcattgcttggttcgcgtggtagcagaggagcttgagaatgttcgcatcttaccacatacagttctttacatggctgattcagaaactttcattagtctggaagagtgtcgtggccataagagagcaaggaaaagaactagtatggaaacagcacttgcccttgagaagctattccccaaacaatgccaagtccttgggattgtgaccccaggaattgtagtgactccaatgggatca

SEQ ID NO: 184 - DNA, 300 bp, Homo sapiens
ctgttttgcagatgaggaaactgaggtacagaattcttagggaacttacccaaaatggcttttctgcactctgccctttggtattgtcccatgtgaattgtttaaaacttatgtgtatagtggcatgagtaggtgatttcagaaacagaactcacttttgttgtttggtcttaaaattaggaacttttcttcatctgggcttcatttccctgcaccttcccagctttctagtcatgcaagccacatgtctccacgtgaggggttcattggaaagcagccacagagccaccccctggctgg

SEQ ID NO: 185 - DNA, 260 bp, Homo sapiens
attatagagattaatctcctttgctcgaagtctatttaaatattagtcacatctaaaacatacttttacagcaacatctagactggtgtttgaccaaacaactgggcatcatagctgacacataaaattaaccatcacaaccatgttctaggcactgttcctcactgcctgagaagacaccgttatgtttattagggtttttgagttttatccacagcttttggttatctgcaaccatgtctcccacctttaacatagtt

SEQ ID NO: 186 - DNA, 300 bp, Homo sapiens
gataaactcttcagtgacgaatattagaaaaagttagttatacatttgaggaaaactataaaagtaccaataatgagtaggaaatcacttctgcagtatttttggagcattttccttaagcatgacataaaagccaaaggtcacaagggaaaaaactgatagatttgtctgtgatattgagagatgtatgcacatatacatacaacagtcatagtaagacaccgttagacaaaaggtgatgtatgaaaaagaggcaaaacaacaagaagaaaagattgaaaaaatgagagctgaagacgg

SEQ ID NO: 187 - DNA, 300 bp, Homo sapiens
  misc_feature (1)...(300): n = A,T,C or G
aaaaagtaaagcttttcatgagcacaaatcccttgcattgtttgatgttactgatattcgtaaaatgaatattttttgttttgttttgttttatttttttgagacaagtcttgctttgttgcccaggctggagtgcaatggcatgatcttggctcactgcaacccctgccttgcgagttcaagtgattcttctgcctcagcctcctgagtagctgggattacaggcgctcaccaccacacccagctaatttctgtatttttagtagacacagggttttaccatgttggccangctggtct

SEQ ID NO: 188 - DNA, 300 bp, Homo sapiens
gagcattcctcctttgttaacgaagcaacatttacacaagatggacattacattattagtgcatgctctgatggcactgtaaagatctggaatatgaagaccacagaatgttcaaatacctttaaatccctgggcagcaccgcagggacagatattaccgtcaacagtgtgattctacttcctaaaaaccctgagcactttgtggtgtgcaacagatcaaacacggtggtcatcatgaacatgcaggggcagattgtcagaagcttcagttctggtaaaagagaaggtggggactttgtt

SEQ ID NO: 189 - DNA, 300 bp, Homo sapiens
ctaatatccagaatctacaaagaactcaacaagaaaaaaaccaaccccacaagcgggcaaaggacatgaacagacatttcccaaaagaagacatacaagcaacctaaaataatctaaaataatttttaaaaagaaaaaatgcttgacagagttttgatagtacttagtaaaaagttatatctagtggctttttgtttgtttgtttttgttttgtttttaagaaatagtctctgtttcccaagctggagtacagtggcgcaatcttggctcactgcaacctcgaactcctgggctcaagcg

SEQ ID NO: 190 - DNA, 300 bp, Homo sapiens
aaccactatggaggcatgattggtggccactacactgcctgtgcacgcctgcccaatgatcgtagcagtcagcgcagtgacgtgggctggcgcttgtttgatgacagcacagtgacaacggtagacgagagccaggttgtgacgcgttatgcctatgtactcttctaccgccggcggaactctcctgtggagaggccccccagggcaggtcactctgagcaccacccagacctaggccctgcagctgaggctgctgccagccagggactaggccctggccaggcccccgaggtggcccca

SEQ ID NO: 191 - DNA, 300 bp, Homo sapiens
gcggcgctgacccggccggccccacacccgctcttcctcttctttgccgcggactccctttcctgcctccaagacctggtgtctcccactgtgagcccagctgtcccacaggcagtccccatggacctagactcaccttccccttgcctctatgaacctctgctgggcccagcccctgtcccagctcccgacctgcacttcctgctggactcaggcctccagctccctgcccagcgagcggcctcagccaccgcctcccctttcttccgggccctgctgtcaggcagctttgcagaagcc

SEQ ID NO: 192 - DNA, 300 bp, Homo sapiens
gacagaccgttgagaggacgtggaggcccgagagggggtatgcgcggcagaggcagaggtggccctgggaacagagtttttgacgcttttgaccagagaggaaagcgagaatttgaaagatatggtgggaatgacaaaatagcagtcagaactgaagacaacatgggtggatgtggagttcgaacctggggatcgggtaaagataccagtgatgtggagccaactgcaccgatggaggaacccacagtggtggaggagtcccagggcaccccggaagaggagtctccagccaaagttcct

SEQ ID NO: 193 - DNA, 300 bp, Homo sapiens
ctcaagaaaggagaagtttttttgtatgaaattggaggaaatattggggaacgctgccttgatgatgacacttacatgaaggatttatatcagcttaacccaaatgctgagtgggttataaagtcaaagccattgtagaagacttaacaagctgcagataaccatgtggacttctgtcataattcttgctgagtcaagagtgtaaataaaagaaatggcaggactcatattattcagttgtacccaagtatttaaaaatgactctcttaagccttaaaaagtcatagatttgtgctgctg

SEQ ID NO: 194 - DNA, 300 bp, Homo sapiens
cagaagcttagtcatatttcaaaatgatcaaatatcaagaaaaattctgagctgcataacttgtataaagtaattttcagtgatttttttcatggttatgataaaagaactggattagcagaaacttttaccctgaatcaagatttaatttttctttgagctcatcttaaggatatcggaacatagggagcaaacgatggtgtggctgcctcagtgcttgatttttaacggttttgaagagaatagttacatttcttctcctagtaagaactaataaatacattaacagaaatgaattcc

SEQ ID NO: 195 - DNA, 300 bp, Homo sapiens
ctctactaaaaatacaaaaattagctgggcgtggtggcacacacctgtaatcccagttacttgggaggctgaggcacaagaatcgcttgaacccgggaggcggaggttgcagttagccaagatcgccctgctgcactccagcctgggcaacagagggagactctgtctccaaaaacaaaaacaaaaactgttagtgaaggttccctgggacttttgatattttaaaaattgatcttatgactaagtagataaattcattgccataatgaggctagctcccagataaacagcgtattttct

SEQ ID NO: 196 - DNA, 300 bp, Homo sapiens
tggatactgacaatggtggcaggcatttcaagccttttaaattagtactttttgtcgtcttgcttattaaaattttgttaattttagcaaagaccaattgttgtgataaactggtgttttttggatgcttcaagcacacgttaaccaattttttaattccccttttggttcctcccattgttctaaaataggactttcatattattaaaacctcaaaagatgatccacccaggatgaacaaagatcaccaaggggaaagaaaacattttttatctttacagaaaacatgttaagattata

SEQ ID NO: 197 - DNA, 300 bp, Homo sapiens
atccagatgggatacctctaaacacgaaaagaaagaagattccattagtgaatttttaagtttggctagatcaaaagccgagccacctaaacaacagtccagccccttagtaaacaaagaggaagagcatgcaccagaatcatccgcaaatcagacagtcaacaaagatgtggacgcacaggctgaaggagaagggagccgcccatccatggacttattcagggccatctttgccagttcctcagatgaaaagtcctcatcctccgaggatgagcaaggtgacagtgaagatgatcaggc

SEQ ID NO: 198 - DNA, 300 bp, Homo sapiens
gcaacatttgtctacaactctactgtaaaattggaaatgcttttccacagaaaaacctctcaaaatgctgaatgcaaaagttgggatcacagaaacattgtgcctatttttggtctgctggaaactgtatttttacaaggtaatccctgttttcaatatagttcctgtcttgccactggcggttttcttgtagcatttttctagttctgagattgctactacccaaagtattcatttctttcttactggggtgtcctctgtcttcacagcctgcttctggattgtaggttttttcctttc

SEQ ID NO: 199 - DNA, 300 bp, Homo sapiens; identical to SEQ ID NO: 198

SEQ ID NO: 200 - DNA, 300 bp, Homo sapiens
agtagaaaaatacaaagactgtgatccgcaagttgtggaagaaatacgccaagcaaataaagtagccaaagaagctgctaacagatggactgataacatattcgcaataaaatcttgggccaaaagaaaatttgggtttgaagaaaataaaattgatagaacttttggaattccagaagactttgactacatagactaaaatattccatggtggtgaaggatgtacaagcttgtgaatatgtaaattttaaactattatctaactaagtgtactgaattgtcgtttgccctgtaactgtg

SEQ ID NO: 201 - DNA, 300 bp, Homo sapiens
ttctactttgggtccgcgcgaagcccactcacgtgtgatctgtgttgcccctctcggtggtcccaggcgatccagccatgccccctgcccctctgcccagatgcttcaggggcccggcttttcaggcttgccctcaccagcggccgtcagccgacactcagggatgtagctaacaccactccgccagtgctttcagtaggaagagctgaggctgcctgggaggcccggggcgaccggaaaagggctctctcaagttctgaaaagagaatctgccaccagatcgaatttcgacccctgagc

SEQ ID NO: 202 - DNA, 281 bp, Homo sapiens
ggccatgggacagttgcaacagcagttaaatggactgtcagtcagtgaaggtcatgattctgaagatattttgagcaaaagtaacctgaacccagatgccaaggagtttattccaggagagaagtactgagccgagaaagctttgaggaagacttgtctgtccccacatctggggatagtaatgcccaaaatggtggagctgaagagggggatggggcgggcgaggggtgcacagcgggaaggggagtggtggtctcacgatactgtgactctgagtaact

SEQ ID NO: 203 - DNA, 300 bp, Homo sapiens
gccctcagccacccccatccctgccccttctgagactcacagcacccctttccttcctctcctcccacctcctccctcagcccctcattctccttgggaatctgcagagggctctgggactcactgccggatgtgaaatccaggcgtcagctgtttcctaggcaagggcaggaaagtggtctccagcccttgctccactcatgcctgggggcctggggctgagtggtatccctacctggcctccccctggcctctgggcctccagcgctgggtttgtcgagtgagagagagagaggagct

SEQ ID NO: 204 - DNA, 269 bp, Homo sapiens
gcggactctcaggacgaaaagagccaaacctttttgggaaaatcagaggaagtaactggaaagcaagaagatcatggtataaaggagaaaggggtcccagtcagcgggcaggaggcgaaagagccagagagttgggatgggggcaggctgggggcattgggaagagcgaggagcagggaagaggagaatgagcatcatgggccttcaatgcccgctctgatagcccctgaggactctcctcactgtgacctgtttcaggagcctcatat

SEQ ID NO: 205 - DNA, 300 bp, Homo sapiens; identical to SEQ ID NO: 201

SEQ ID NO: 206 - DNA, 300 bp, Homo sapiens
gggattacaggcatgacccaccgcgcccagcctgtaatttcttatacttggtattttgtacttggattatgcttctgatacgctataattatttatgtacatgttatttttcttcaatagactgtgaactcttcgaatgtaggactcctagagctagatactcaattattttttattaaattgaatgacttgaaactacagatcctttatttaaacttcccaaatttctgctttatctaggcaactctttaaattctttgatctcatgtagattccaaaggctgaaataattgagatttt

SEQ ID NO: 207 - DNA, 300 bp, Homo sapiens
tcctgaagctcggggggctgcaggtcctgaggaccctggtgcaggagaagggcacggaggtgctcgccgtgcgcgtggtcacactgctctacgacctggtcacggagaagatgttcgccgaggaggaggctgagctgacccaggagatgtccccagagaagctgcagcagtatcgccaggtacacctcctgccaggcctgtgggaacagggctggtgcgagatcacggcccacctcctggcgctgcccgagcatgatgcccgtgagaaggtgctgcagacactgggcgtcctcctgacca

SEQ ID NO: 208 - DNA, 300 bp, Homo sapiens
attccaaaggtttcaaagaacttggtcataaatatgataatgagaagacaaagtatttatattaaaacagtttagtagccttcagttttgtgaaaatagttttcagcacagaaactgacttctttagacaaagttttaaccaatgatggtgtttgcttctaggatatacactttaaaagaactcactgtcccagtggtggtcattgatggcctttagtaaattggagctgcttaatcatattgatatctaatttcttttaaccacaatgaattgtccttaattaccaacagtgaagcact

SEQ ID NO: 209 - DNA, 300 bp, Homo sapiens
gagacagcagcccccagggaatgaagctgatgccagagtcagacccgaggaggaagaggagccactgatggagatgcggctccgggatgcgcctcagcacttctatgcagcactgctgcagctgggcctcaagtacctctttatccttggtattcagattctggcctgtgccttggcagcctccatccttcgcaggcatctcatggtctggaaagtgtttgcccctaagttcatatttgaggctgtgggcttcattgtgagcagcgtgggacttctcctgggcatagctttggtgatgag

SEQ ID NO: 210 - DNA, 300 bp, Homo sapiens
gtaacgtgacacgtattttacttcttttagtaggcggacacactttcttaaagtggtaatacgtcatggccctgctataaggtagtagttctagaagactgtttatctaataattcagactaaagctatttatattgctgtgacaccacgtggaaaacttttataattccatcttatttctgatgtatatgttttattttctctgccttcataagaactaaaaaccaaagttatttacgtgaaaacaagatttttgtttgagttcatttacttgagatatgtttaaaaaatccaccttct

SEQ ID NO: 211 - DNA, 300 bp, Homo sapiens
gtccgtcagctggtagctttcattcgtaaaagagataaaagagtgcaggcgcatcgaaaacttgtggaagaacagaatgcagagaaggcgaggaaagccgaagagatgaggcggcagcagaagctaaagcaggccaaactggtggagcagtacagagaacagagctggatgactatggccaatttggagaaagagctccaggagatggaggcacggtacgagaaggagtttggagatggatcggatgaaaatgaaatggaagaacatgaactcaaagatgaggaggatggtaaagacagt

SEQ ID NO: 212 - DNA, 300 bp, Homo sapiens
gcctgctgcttcatgccgccggcgtcctgctccacgtctctgtgctgctgggccctgcactgtcggccctgctgcgagcccacacgcccctccacatggctgccctcctcctgcttccctggctcatgttgctcacaggcagagtgtctctggcacagtttgccttggccttcgtgacggacacgtgcgtggcgggtgcgctgctgtgcggggctgggctgctcttccatgggatgctgctgctgcggggccagaccacatgggagtgggctcggggccagcactcctatgacctgggtc

SEQ ID NO: 213 - DNA, 300 bp, Homo sapiens
ggtatggttggagtgtaggaatgaatattcatgaaatgtttcttattgcttttccttccctaattcatacaatgaatgtatttggaatacttacatattataaaataaactatacctcttcaagaggtatcctgttctgtaagatcagatgtttttattgcaggtcaatataatactgccagagacagaaaatacccccttatcagtcccttagtgcctctttctgtttgtggcatggtgagaaaacccatgctgaaaagattgtactttgtgatcccaatcagagggaggagctaatct

SEQ ID NO: 214 - DNA, 300 bp, Homo sapiens
ggaaagggccctaaaagagatgaacaatacccgtatcatgtggaatgaattagaaacccttgtcagagcccatatcaacaactcagagaaacatcaaagagtcttggaatgtctgatggcatgcaggagcaaacccccagaagaggaagaacgaaagaaacgaggaagaaagagggaagacaaagaggacaagtcagagaaagcagtgaaagattatgaacaggaaaagtcttggcaagactcagagagattaaaaggaatcttagaacgtggaaaagaagaattggctgaagctgagat

SEQ ID NO: 215 - DNA, 300 bp, Homo sapiens
atactttttaaaccttttttggcagctcagatggtgtaaattttaaaattttgtataggtatttcataacaaaaatatgtatttcttttttgttattttatcttgaaaacggtacatattttagtatttgtgcagaaaaacaagtcctaaagtatttgtttttatttgtaccatccacttgtgccttactgtatcctgtgtcatgtccaatcagttgtaaacaatggcatctttgaacagtgtgatgagaataggaatgtggtgttttaaagcagtgttgcattttaatcagtaatctac

SEQ ID NO: 216 - DNA, 300 bp, Homo sapiens
gcagatatttactgaaggaatctaggttgtattttcagtggacaatgggaataaagcatttctaaagcaccgactggagaggaaggcaacagagacaaggagagaagccgagagacatgtctgcgtgctgccacgcatctgagcgattgctctgtgaagagttgtacactgaacattttcaggggaggctgtttacccaggcaatgtcctcaaacaagcctgtgccggggagtcctggaatctgtgccaggactgtgtttttagcccttcacctctcagctttagcaggacatgaaccag

SEQ ID NO: 217 - DNA, 300 bp, Homo sapiens
cccccatcttcactggttattccacttatttaaaatgtccagaataagcaaatctccatatagaggaagtagattagtggttgcttcgggatgggaggaatgggaagattgaggtctttcttttgcagtgataaaaatgtcctaaaattgactgtagcgatggtcacacaactctgaatatgcttaagaccattgaattacacactttacgttggtgaattgtatggtatgtaaattatagttcaataacatagttacaaaagataatcaaaagcatgaaagcactgttgatgtggtttg

SEQ ID NO: 218 - DNA, 300 bp, Homo sapiens
acggcctggtggagcagctgtacgacctcaccctggagtacctgcacagccaggcacactgcatcggcttcccggagctggtgctgcctgtggtcctgcagctgaagtcgttcctccgggagtgcaaggtggccaactactgccggcaggtgcagcagctgcttgggaaggttcaggagaactcggcatacatctgcagccgccgccagagggtttccttcggcgtctctgagcagcaggcagtggaagcctgggagaagctgacccgggaagaggggacacccttgaccttgtactaca

SEQ ID NO: 219 - DNA, 300 bp, Homo sapiens
caactagagaagattggacagcaggtcgacagagaacctggagatgtagctactccaccacggaagagaaagaagatagtggttgaagccccagcaaaggaaatggagaaggtagaggagatgccacataaaccacagaaagatgaagatctgacacaggattatgaagaatggaaaagaaaaattttggaaaatgctgccagtgctcaaaaggctacagcagagtgatttcagcttccaaactggtatacattccaaactgatagtacattgccatctccaggaagacttgacggcttt

SEQ ID NO: 220 - DNA, 260 bp, Homo sapiens
ggtaagtcaggtgattgaatcccggaaaggttcattgtcttcaagctcacaatactattttgggacaaacagttgtctagtgtttggactcatgaaccctgattcttgagggtggtattttactgcttttgtgatttggtttcaacatatatagtcttttctccggagttaccttaggtcagtggccagtgtttcagcccctggaaagggcatgggctgccactgaggttggtcacaggcctctcagctcatggtgggag

SEQ ID NO: 221 - DNA, 300 bp, Homo sapiens
gggttccatcccttccacccaggaaatggaggcacgacttgcagcgttgcagggcagagttctaccttctcaaaccccccagccggcacatcacacaccggacaccaggacccaagcccagcagacacaggatctgctaacgcagctggcagctgaggtggctatcgatgaaagctggaaaggaggaggcccagtgaccctccaggactatcgcctcccagacagtgatgacgacgaggatgaggagacagccatccaaagagtcctgcagcagctcactgaagaagctgccctgatgag

SEQ ID NO: 222 - DNA, 300 bp, Homo sapiens
gcggtgacccacgtgtcctgcatgattgccctactgctgtggagacctcgtgctgaccatctggcagtgttcttcgtattctctggcctgtggggcgtggcagatgccgtctggcagacacaaaacaatgctctctacggcgttctgtttgagaagagcaaggaagctgccttcgccaattaccgcctgtgggaggccctgggcttcgtcattgccttcgggtacagcacgtttttgtgcgtgcacgtcaagctctacattctgctgggggtcctgagcctgaccatggtggccgtatgg

SEQ ID NO: 223 - DNA, 300 bp, Homo sapiens
gccccctctggatcctgagctccctgctctagacagtgatggtgattcagatgatggcgaagatggtcgaggtgatgagaaacggaaaaataaaggcacttcggacagctcctctggcaatgtatctgaagggggaaagccctcctgacagccaggaggactctttccagggaagacagaaatcaaaagacaaagctgccactccaagaaaagatggtcccaaacgttctgtactgtccaagtcagttcctgggtacaagccaaaggtcattccaaatgctatatgtggaatttgtctga

SEQ ID NO: 224 - DNA, 300 bp, Homo sapiens
ctgcggccgcaggagctgtggcggttttcctaatcctgcgaatatgggtagtgcttcgttccatggacgttacgccccgggagtctctcagtatcttggtagtggctgagtccggtgggcataccactgagatcctgaggctgcttgggagcttgaccaatgcctactcacctagacattatgtcattgctgacactgatgaaatgagtgccaataaaataaattcttttgaactatgatcgagctgatagagaccctagtaacatgtataccaaatactacattcaccgaattccaaga

SEQ ID NO: 225 - DNA, 300 bp, Homo sapiens
gccccgctccatgagcagtgactccccagctcctcctggcaccagtccccagggctctcctgttggtagttcctgcttttcttcttggaaattcctcgtggacctcgagatctttaccctaaaatagttctgttgaatttcaccctggcaatgtaaattgatagcttatcttcacagatgccagacaatggacaactcaccatcagtcctctgctcacctgagacaaatgcatgtctgattgcttcctctgccctattgtttatgtgaaaatgcagattcactgagccagactaaggcat

SEQ ID NO: 226 - DNA, 300 bp, Homo sapiens
tatataacaacttttgctttcaaagttgggtgggactagaacacacaatggaaggatggagtcaggagacctggattcttgtgcccgctctggcttttacagtctgcctaactctatgcagtcacttcctgccagcctgtttccttacctacaagagggagagacactccctggccagcctagttctcagggtgaacgaaaggtcattatcactgcatcctctagtcatttgcttcttcgctaattaacacatcttgagcacctgcgatgttccaggaacaggagatggcagcgtgcaag

SEQ ID NO: 227 - DNA, 300 bp, Homo sapiens
ttgctgaaatgggcacttctgctgtgatgctagtgttgattttgctctcagatgaacacaatgtctcatactaaccaagaagcaagaaaagccccatgcattcatttttcacttggagtgacaatgggagaggtcaggaatcaagttcactttcaagatctaagggagtccactatctgtgcaattgtatttggcttttttttgcactgtttcaatgctggtaattgaaaccattttaatatatttggttgtattcactttatatgtccttccaaaaatgttgttgtgtacataccatgc

SEQ ID NO: 228 - DNA, 300 bp, Homo sapiens
gctatgtattgtgtcctaccatgaattcactccatgctagccacattggcctgtatggctattccttggacacacctaggatgttcttgcctcttagcttgcctacctttctctcatcatttgggcctcagcgaggatatcatctcctcagagaagccttctgtgaccatgctatctaaaatactccagcacttcagtcaccctttatcccattactctgctttttcagaaacattggtgctccctgaaacatatttgtttacttgcttagtgtcttttctcccgcactaccatgtaagc

SEQ ID NO: 229 - DNA, 300 bp, Homo sapiens
gattttcgaaactcttcagctacttgcccttttttatctgaaaccatcataccttctgaaagaaaaaagcatatcttcattgacataacagaagtgagatggcccagtcttgatacagatggtaccatgatatatatggagagtggcattgtgaagataacatctttagatggtcatgcatacctctgcctgcccagatctcagcatgaatttacagtacattttttgtgtaaagttagccagaagtcagactcatctgcagtgttgtcagaaacaaataataaagccccaaaagataaa

SEQ ID NO: 230 - DNA, 300 bp, Homo sapiens
  misc_feature (1)...(300): n = A,T,C or G
acttcttgtttgccttttttataaggaaatgttggagagttacatcattgctaatgtagaaatgttaagtggaaaaatatacagtttggtaaaataaactagattctacatttatttgtgggtttttttcccctcctttctttccacagcacttttgatatcaagcaagtggcttcctttttgagatattaaaaaaaaaaagaaaaggaaaaaagtaaatgannnnnnnnnnnnnaaccctttctnattngnattngtttnagnattgngaagttgngttaaanagtnctagntagaaat

SEQ ID NO: 231 - DNA, 300 bp, Homo sapiens
  misc_feature (1)...(300): n = A,T,C or G
tgattctttttgttnttttttttgatattgacaaaagcttanncnttncnattaaaaangccactaattagactttttanntaaaaaangtagggggttttaaaactactttcctactaccaaaaaatcanaaagtatctagctttctaaatngggaaagcaagcaatgttataaaaacnctgaaggaatctctttcttcgggaccttttgttaaactcggttnaagctgtaaaccttatttaaaataaaatttaccacanaacaggaaatanaacctggggaanactcnaaatacncct

SEQ ID NO: 232 - DNA, 300 bp, Homo sapiens
ggaagccaaggcctggagctgcaggtcccccggcatctctctctgtcccggcagcccaggatggcctggtgcccccacctgctgcagcaggagccccaaggagtgctagctgagggtggttgctggggtggtcctcatggacagtgaggtgtgcaagggtgcactgagggtggtgggaggggatcacctgggttccaggccatccttgctgagcatctttgagcctgccttccggtgggagcagaaaaggccagaccctgctgagttagaggctgctgggatccactgtttccacacagc

SEQ ID NO: 233 - DNA, 300 bp, Homo sapiens
gaggaagaggcctgctccacttgtctgggaacctgggcaggaggcacagaggaagccaaggcctggagctgcaggtcccccggcatctctctctgtcccggcagcccaggatggcctggtgcccccacctgctgcagcaggagccccaaggagtgctagctgagggtggttgctggggtggtcctcatggacagtgaggtgtgcaagggtgcactgagggtggtgggaggggatcacctgggttccaggccatccttgctgagcatctttgagcctgccttccggtgggagcagaaaagg

SEQ ID NO: 234 - DNA, 300 bp, Homo sapiens
ggaacataattagcttactgatttgatggttctgtgtagttcctgaaactcttggctcttgtttgcctttctttaactctggctccttctccttcttctgtttgtgtatctgtttaattcattgagtgaggaggacaggcagaactgtgtctgccaaggaccggatgtacttctttccttgctcttggttttttgctcacttttatatgtaaggtattagtacaaacctaaaggagagaaagtagaggatcagatcattgggacttgttctggtttcaagaaagaattaacaaattgccg

SEQ ID NO: 235 - DNA, 300 bp, Homo sapiens
gttggctcaagggccaccagaagcatttctttattattattattttttaacctggacatgcattaaagggtctattagctttctttccgtctgtctcaacagctgagatggggccgccaaggagtgccttccttttgctccctcctagctgggagtgacgggtgggagtgtgtgtgcccaggtgggggtgtctcctggctgggaaggagggaaagggagggagagttttgcgggggttggcagtggagagcaggctggagaggagatggctaatagctgtttaatggaaacctgctgggc

SEQ ID NO: 236 - DNA, 300 bp, Homo sapiens
gaatcatcgaaggttgagaccgtgtctagttacatagttataaatacccatctatgtactgatgccttctaaatgtctatctccagtatggtcttttcctttaagctctagatccattgacaccctcaccatctctaaaaggcatttcaaactgaacacatctgatacagaacttttcatttccttcccaactttgcccacgccagcctgctcctccttcacgctttccacttagtatatgatcccactattcactcagtctctgaagcttaaaacctaggattcatccttgactactgt

SEQ ID NO: 237 - DNA, 300 bp, Homo sapiens
caggacatggagcagtacctgtccactggctacctgcagattgcagagcggcgagagcccataggcagcatgtcatccatggaagtgaacgtggacatgctggagcagatggacctgatggacatatcggaccaggaggccctggacgtcttcctgaactctggaggagaagagaacactgtgctgtcccccgccttagggcctgaatccagtacctgtcagaatgagattaccctccaggttccaaatccctcagaattaagagccaagccaccttcttcttcctccacctgcaccgac

SEQ ID NO: 238 - DNA, 300 bp, Homo sapiens
cactggctacctgcagattgcagagcggcgagagcccataggcagcatgtcatccatggaagtgaacgtggacatgctggagcagatggacctgatggacatatcggaccaggaggccctggacgtcttcctgaactctggaggagaagagaacactgtgctgtcccccgccttagggcctgaatccagtacctgtcagaatgagattaccctccaggttccaaatccctcagaattaagagccaagccaccttcttcttcctccacctgcaccgactcggccacccgggacatcagtga

SEQ ID NO: 239 - DNA, 300 bp, Homo sapiens
atttcctccagtcctgggccccatccttgagggccttcccagccagccagcaggagaggcaagaactgggggaacacaggaacctaggggaggaggggagcgctgggcatcctcaggctggcggccaaggcctgcccctggaggcactagaggagggcatctgtctgtgggagcccagaggctgcagggaggaggaggagggaggtatctggtgtgagcgttgcccctgcgacatttgggaccacacaggtgggcttccttattccctgacaaagcctctgtttccagctcttccgccct

SEQ ID NO: 240 - DNA, 274 bp, Homo sapiens
catgagtgatattttggtctgggtttcctcttaagattttagtttgtctgaattaaggaaaaatgtttttaatatacattcttattttgtcccacccctccagaaataagctggaaatcttaactttttggggggtcttttttggtgttttaatgggcccagaactgtggtttaaatttttatgtatgtattttcttttttgtggagtataaatttaaaaactggatttgggacctaaaatactcctcaggttgatgtattcatgaaagtttta

SEQ ID NO: 241 - DNA, 300 bp, Homo sapiens
ctgttgcctgccaagctcagggcccatttatcatgcatcttcccatccttgtctcccccaactgtcccttacctgagtcacaatttcgccaaagccaaagggattgtcctaagccaatgttgatttatcactcttcctgctcaaaagcccccaagatcacctatcaatcacctacttgagtgcaagctttgactctgtcacctgacattcaagtccccctctgcccccatgccagtcttatcccctcccctacatatgccctatgcctcagtttgccttccctccactttaaaaagcctc

SEQ ID NO: 242 - DNA, 300 bp, Homo sapiens
ccgctggctatgtggacgctggggcagagccaggccggagtcgaatgatcagccaggaagagtttgccaggcagctacagctctctgatcctcagacggtggctggtgcctttggctacttccagcaggataccaagggtttggtggacttccgagatgtggcccttgcactagcagctctggatgggggcaggagcctggaagagctaactcgtctggcctttgaggtaatggggggtggcggtggtggggggtgcttagtggctatgctcaccccgctccaggaggcctattttggta

SEQ ID NO: 243 - DNA, 300 bp, Homo sapiens
caagatctggaggaatgcagagaggaacttgatacagatgaatatgaagaaaccaaaaaggaaactctggagcaactaagtgaatttaatgattcactaaagaaaattatgtctggaaatatgactttggtagatgaactaagtggaatgcagctggctattcaggcagctatcagccaggcctttaaaaccccagaggtcatcagattgtttgcaaagaaacaaccaggtcagcttcggacaaggttagcagagatggatagagatctgatggtaggaaagctggaaagagacctgtac

SEQ ID NO: 244 - DNA, 300 bp, Homo sapiens
agtaaattttttatgcatattttattgcaataaaaaatgaaaacagtttcaatctaggaggattttggatgcatctatgccttgagaaatgaatggtttgatgtaaatgcatggtagcaagaataaataattatgttaattcatataatatgttatatatagttttaaagaaaattctatcactgtcttcctatgggtagggctataatgtccagttctttcagggattaagagggtagggtctgaagttaatccttgtttgtcgtaatgttattaatttattcaaccaagacttaattg

SEQ ID NO: 245 - DNA, 300 bp, Homo sapiens
tagacatagaaaacatacagtaagaatatggtattataatcttacgggaccactgtcaaatacgcggtctgtctttgaaaagttgtaatgcggcgcatgactataaatacctagctggttagcatttacattccttgccagggagtttgaaatttatactatagaaataactttaggttttaggtagagttaaagaggtaaagcacatgttgccacaacccaggaaagtatttttaagaaagattggattttcctacctttagagatctaaaaaaaatttaatataaaaaatcattttgt

SEQ ID NO: 246 - DNA, 300 bp, Homo sapiens
tggaatatttgctgtgaagggagaaagggagagaaaactcttctgaggatcatttgtcttggtagtatagtaaaaccaaccagctgaacctttcaggctacaagagaacccgggtcggtaatgtctttttaagaataatttttaattgcttataacaagcatattttgtggcatttgaactatatttactgctccaatatccgttattttccaaaggattttgtatctttttgaaaatgtttacatcatcagatgatccacagaattcactttatgtgagatctcccgagagtttccatc

SEQ ID NO: 247 - DNA, 300 bp, Homo sapiens
gtgttgctcagtgagcagacccgactccagaaggacatcagtgaatgggcaaataggtttgaagactgtcagaaagaagaggagacaaaacaacaacaacttcaagtgcttcagaatgagattgaagaaaacaagctcaaactagtccaacaagaaatgatgtttcagagactccagaaagagagagaaagtgaagaaagcaaattagaaaccagtaaagtgacactgaaggagcaacagcaccagctggaaaaggaattaacagaccagaaaagcaaactggaccaagtgctctcaaag

SEQ ID NO: 248 - DNA, 300 bp, Homo sapiens
gagaggatcacttgagcttaggagttcaaatccagcctgagccaacataacaagactttgtctctaaacaaaacagttattgtttaaagaatctgaaatcttcatctttaattcaggtagcaatgaatcgagcccaagtttgtttgatatccagttccaagtctggagagaggcatctttatcttattaaagtatcgagagacaaaatatcagacagcaatgaccaagagtcagcaaattgtgatgcaaaagggctatcaaagggaggctttttacagagaactaaggaagagaaggagg

SEQ ID NO: 249 - DNA, 300 bp, Homo sapiens
ctagcctgggcaatatagtacgaccctgtctttactaaaaatgcaaaaattaaccacgtatggtggctcacacctgtagtcctggctactgaggaggctgatgcaggagaatcatttgaacccaggaggtcaaggctgcagtgagctatgattgcaccactgcaatccagcctggacaacacagtgagaccctgcctcacaaaaattatattctgattttctgagtccatgaacacattgtccaaatggatttttctagctcctccaagttacagatagttccacgcacacacagaactc

SEQ ID NO: 250 - DNA, 300 bp, Homo sapiens
aggaaggtggaggggcaggaacaggacggacaggccccgggctctggcacatcctggggaacaagggaccacaaggacgggggcagtctccagacttcccctgggcgcttgaccccaggccttgcaggggagagagccagggcctccctcaggtctttgttcatgctgttttccctgccgtggacaccctttcccgctctccgattctctaaatcctgccccatctcccagatcttgttcatgtccaagcttttccaggaagtcttagcagctcccacaccgcagagctcgagatgtctc

SEQ ID NO: 251 - DNA, 300 bp, Homo sapiens
gaaggcagaagtgtaaatgaacatacagaagaaggagaaagcctgctgtgtttggcttgttcagcagggtattatgaattagcacaagtattgcttgctatgcatgctaatgttgaagatcgagggaataaaggagacataactcccctgatggcagcttccagtggaggttacttagatattgtgaaattattacttcttcatgatgctgatgtcaactcccagtctgcaacaggaaacactgcgctaacttatgcatgtgctggaggatttgttgacattgttaaagtgctccttaat

SEQ ID NO: 252 - DNA, 300 bp, Homo sapiens
gcacttctctctcactggaaagagaactgttctcctttctctttcttctgcctattaagcctctgctcctaaactcctcatgtgtgtctgtgtcctaaattttcctggcatggcaggacaaaccccgggtatttaccacagacaacaaaaccgcttcactatgatgtatgcatgctgcaaaggaagagacagaatcttgctctatcacccagctggagtgcagtggcaccattgcagcttactgcagcctcaaactcctggctcaagggatccttcagcttcagcctcctggttaactag

SEQ ID NO: 253 - DNA, 300 bp, Homo sapiens
gtctgatgcaggagaattgctaaaacccaggagggagaggttacattgagccgagattgcgccactgcactctagcctgggcgacagagcaagactccgtctcgaaagaaagaaagagaaaggaaattccccagggaagtacctcggcttatttcataaacaggtactgaaggaagcagaggcatgtggaggacttccccacctcgtgcagctatttgggccgtggcatctgaaatttcttatttcagagtcacccctttgatgaccttggcagtgaactgcagtcatctgtttaggcct

SEQ ID NO: 254 - DNA, 300 bp, Homo sapiens
atgttacagacatgaaatatgaacagaatgctaaaagaacataaaagaataagagctccttaaagattataaataaatggtgatgttaaagtaatagcaccattggacgaagctagggaatcaacacttgacagaaagatacatattttttttatacaaactacatatatttgagcaatcaagtagtagacatagagaattttctttttatggaagtactctaataagtaaagggctgatagaattatatcagcattttctagctcctggggaattatgcattgggcatccatggctgct

SEQ ID NO: 255 - DNA, 300 bp, Homo sapiens
  misc_feature (1)...(300): n = A,T,C or G
gctgcctgtggcatagccactgctgtacgtttttggttgttnttaagaaactcgatgaagaggggtgtcattctgggctcggggtggttgccaatttttcaccagaaagggagccaccccttgcaaccacttctgtctccgttagccccccctctgccctcctccaagccaaagcgtggcctggcttttgtcttcccatttagttttcctcttttacccttccttttgtgcttaatttattaaaatagttgctgtataatttattttcataaactataaaaaaatactaaatggttaaaa

SEQ ID NO: 256 - DNA, 300 bp, Homo sapiens
acagtctcgggtttcatattttgctgtttttgatggacatggaggaattcgagcctcaaaatttgctgcacagaatttgcatcaaaacttaatcagaaaatttcctaaaggagatgtaatcagtgtagagaaaaccgtgaagagatgccttttggacactttcaagcatactgatgaagagttccttaaacaagcttccagccagaagcctgcctggaaagatgggtccactgccacgtgtgttctggctgtagacaacattctttatattgccaacctcggagatagtcgggcaatctt

SEQ ID NO: 257 - DNA, 300 bp, Homo sapiens
atagaactaggcactgatttgtttatatttatcctgctcgagacacatgatgtttcatgtatctgtggctttttatagtttaaaataatttctggaaaagtcatagtcattatctctttaaccgctccctctcttccattctctttgttctctcttcctcgaactcctgttagtcatttgatcctccatatctctgaatatttttgtatttcttttattatttatttcttgtctctgctacattttacattgagtaaaagtgggatgtgacagtgggaaatcattagtgacttagaaatt

SEQ ID NO: 258 - DNA, 285 bp, Homo sapiens
tactctattatattgtgcatgctcctgatttagctgctcttggcatcattggtcgcagtggaaccttgaaatgcatctggctagatttatgctcaaatcattctcagttagccttttagtgcctcttcaaaggtttttttttgtatgttttctattcttaataaaagcttaggattaattagaaagaatctgatatggttatgtttccccttgtgtacgctgacctcattcatacgtttttcatagtccagtggtctaaacgctttcaagagcccagctccttgg

SEQ ID NO: 259 - DNA, 300 bp, Homo sapiens
gccttctctggcctcaccaattaggtcaaatgttccttagaatgtgttgtggggcatggtctctccctgtgaggacctgtccagctggacctccgccttcctgcgactgtattggtgtctttccctctcaagcctatgagctctgcaagggcagggaccctgtatgattttgcctatcgtatgtcctccagcccccagcacagcgcctggtgtccagtgagagctcagcaaatactttgtgagttaaggacaggcggctgggtagatggatcgtctgcctagacagggcagttattcgct

SEQ ID NO: 260 - DNA, 300 bp, Homo sapiens
gaaaagggagccgcgcagcgcctacgggagtccggcggcagcagccggtaccggcaaccacgggcagctctcagggaatctccgtcgtgaggccagaggctccagtccccgcgagtccagatgcctgtccagcctccaagcaaagacacagaagagatggaagcagagggtgattctgctgctgagatgaatggggaggaggaagagagtgaggaggagcggagcggcagccagacagagtcagaagaggagagctccgagatggatgatgaggactatgagcgacgccgcagcgagtgt

SEQ ID NO: 261 - DNA, 300 bp, Homo sapiens
tttgctttcagtggttggctttcactgaaagaaagtgtaaaaaaagtcagaatttatagctttcactatgtccaagactaggactgggttataaagattttcttttgtgaaggaaaataaaagaaaatttgccactactgcatttactttactattgtaaacttaagattcattccttagtctttggaattttgatgtctcaaaaccagatgagtggaagtgctgaatttgcaaaataaagctaagaatgcttaactctgcactttaagttctactctgaccaaattgaagatgagcaga

SEQ ID NO: 262 - DNA, 300 bp, Homo sapiens
ttttttaagagataaggtcttgctatgttatctaggctggcctaaacttctgggctgaagtgatcctcctgtgtagctgggactacaagcatgtgccaccaatgcctggcttctcacactgttttgtaacatagatatgtgaagatgtgtattatagaattgtttgtaatactgtagtgttgtaggcaatgtgactgtctatagggaagtggacaggttatttgtggtaaatactcatggaaaacggtcaagcagttaaaagcaatcaattatggtcacccagcaatgcagataaatctt

SEQ ID NO: 263 - DNA, 300 bp, Homo sapiens
agaacagggagaagagaggaagagggagctgcaggtgccagaagagaacagggcggactctcaggacgaaaagagtcaaacctttttgggaaaatcagaggaagtaactggaaagcaagaagatcatggtataaaggagaaaggggtcccagtcagcgggcaggaggcgaaagagccagagagttgggatgggggcaggctgggggcagtgggaagagcgaggagcagggaagaggagaatgagcatcatgggccttcaatgcccgctctgatagcccctgaggactctcctcactgtga

SEQ ID NO: 264 - DNA, 300 bp, Homo sapiens
ttaaaggtagttttagaaggaagtacaaattggctttcatcttgcaaacaatcgttttttacttcattatcttaatttgctttgtcactcataaaaaggaaaccatacctgagttgtagacaatgaggaaacacttgaggcttctgctgtgtgttcttttgttattgttgttattgttgttactcagtaacttgaatattgtttaatgtgttgtaagacgtagagtttatctcaagctgttaaaaatggtaatgtacaaatgtgaatagacacttatctatataatatgggtaagttttg

SEQ ID NO: 265 - DNA, 300 bp, Homo sapiens
caggaaagtcttcctagaggtaatttttaagctgattgttttagaattagtagaagcttgccagatggaaaagtccaggcaaagtgtaacatgaatgggaaaggccacagtctagaaatggcagagtgtgttcctagtttgtttgtttgtttgtttgtacctgccttgttccaggaaggatttaatgtggtttatattccagtcctttaatgctggaagggctgagatgagactgaaagatgggcaggaagtatatcatcacaagctttgtgtttgatgttaatgtgtatgatttttata

SEQ ID NO: 266 - DNA, 300 bp, Homo sapiens
  misc_feature (1)...(300): n = A,T,C or G
tgtgccaccacacccagctcattattattattattattattattattttgagacgaagtttcactcttatcccccaggctggagtgcaatggtgcgatactggctcactgcaacctctgcctcctgggttcaagcggttctcctgccttggcaggcacctgtagtgtcagctactcgaaggctgaggtgggagaatcgcttgaacctggggggcggagattgcaatggtgtggtctcggctcactgcactcgagcctggcgacagagcaagactctgtctcaaaaaaaaaaaaaaaaaan

SEQ ID NO: 267 - DNA, 300 bp, Homo sapiens
atataactctggaggtcaggacataggagatattgattcaggacttgccagagtatggtcttggggtgtgccctgatattacaaacagggatcttagtggctaggtgatgaggccatggcaaatgtagatggaccaagatcaatttgcctttctagatgaggttttctaggtgaaatgtttttgaaactattttgtagcctagtataatttataaaagtagagagaaactataaatataaatttggaaggggttagctaaaaggagaaaacagcagaatcttcatatatatagaaatgga

SEQ ID NO: 268 - DNA, 300 bp, Homo sapiens
cctacttattggatgttggctctttggtgtcatggagatggctttactgtaggtttgtgtgtgttgcattacttttcattgggattgaactgagaaataacaaacaagctttaagtgggaaattaaaaaaaagaagtaacctatgtagatccaaacttaaaatgtgagaaattattgaaatttcattttctacaaacttgaaattagcctgctaattgtaaagttgttttaataatgctgacaaatgtcagttacgtttgcaaaggagtgtatggttctaggtatttgcctactgttacc

SEQ ID NO: 269 - DNA, 300 bp, Homo sapiens
cctacttattggatgttggctctttggtgtcatggagatggctttactgtaggtttgttgtgttgcattacttttcattgggattgaactgagaaataacaaacaagctttaagtgggaaattaaaaaaaagaagtaacctatgtagatccaaacttaaaatgtgagaaattattgaaatttcattttctacaaacttgaaattagcctgctaattgtaaagttgttttaataatgctgacaaatgtcagttacgtttgcaaaggagtgtatggttctaggtatttgcctactgttaacc

SEQ ID NO: 270 - DNA, 300 bp, Homo sapiens; identical to SEQ ID NO: 269

SEQ ID NO: 271 - DNA, 300 bp, Homo sapiens
ccacatttaagtgagatatgggaaggaggagcagattgtttttgaagggaggaagagcagttacttagggtcaaattaagttgtaaaatcccccccgggattttgtatgtaagtcaaagtgaattgtatttggaagaagaactggggagcccacctctggtattttttttatgtccctcatatggacaaataaacctctggtattaaatgaattttcttttgggggattctatatattcgggatttcaaccaccaacctatctggtttttcccgctgaaatgttgggtgatggaatcagg

SEQ ID NO: 272 - DNA, 300 bp, Homo sapiens
gaacgcttccattttatacctgtgtctagttagtttctgcctatctatccaagaagcttttatcaagggtccaccatgtgccagccactgaagtagatataaatacaaggatgtgtaaggtatggatgatggtatacgaactgtcatcttactggatttgtccgctctgttaaagatacggttccgaaaactttttaaagccctagagagggctttaaggcaatgtagcatcatatatagaggcatcaacctgttcatatctttctatttaacagaactgtgcacctgggcacaagggtg

SEQ ID NO: 273 - DNA, 300 bp, Homo sapiens
gaatggcgtgaacccgggaggcagatggtcttaaagtggggagacccgggttacaggcctgactgcatcactaactcgctgtgtgtccctgggcaagtcagtgcagtgcagtagcctctccgtctccgactgaggagcaaagccctcggctcaagatcctcacctacttcacagggatttgaaatagtgcagtcaacaggaaaagaaaagcgctatagaaatgctcgacgctatcacttggggcccacgtggaagtatcaacgtataaattggcccaggcagacagaaggatgcagggga

SEQ ID NO: 274 - DNA, 300 bp, Homo sapiens
ggaaccaggggctgcagaaccagcccctccccaatgaggaccccctctggacgcccctccccatggagaacaccaggagccacagaccccagaccacaggagcacacaggggagggcacggggcggccggggcagggtgtctgctgcctcgtttatgggatttgctccgcgtctagcacactgctgcctgcagtgctcctgtcccctgcagtggctactctgggcctacgggcctaatcctggttggcatgaaaatgtcctgaggctactgtgacaaatttccacaagctgagtggctta

SEQ ID NO: 275 - DNA, 300 bp, Homo sapiens
ctttgggaagcagaggtggcaggatcattccagcccaggagttcaagaccagcctgggcaacacagtgagtgagaccctgtctctatttaagaaaaaataattaagaaattttattaaaaaagaagaatcaggaaaccaagtccaacccaactaaacctcaaatgaaccagcccctaacacagatgaggggatttgggactgataagctctgtgctgtgtccatggcccgtcatttatcaaggctgcagctttgtaaatgtggctatttttatgttgtgtatagtttctatcatttattt

SEQ ID NO: 276 - DNA, 300 bp, Homo sapiens
tttgtatttttagtagagacagggtttcttcatgttggtcaggctggtctcaaactcctaacctcgtgatccgcctgcctcgacctcccaaagtgctgggattacaggcatgagccaccatgcccagccaaagatcatttttttatatagacttcagccctttgtaaatattgtaactggggagtatagagtagaaaaaaagtatagttaaaacatttgttctacaaattaacctttaaaaatataattactgctaaaaatagagtgctgttacacttaaggaaaattagtgccattttg

SEQ ID NO: 277 - DNA, 300 bp, Homo sapiens
ctcacacagcatgtgtcagatccatggggtaggagtcggccagagacttggtaacagacagattgctggatcccacccctagactctctgattcagttagtttggggtaaggcgcaagactgaatttttcacaagtttcccagtggtgctgatacttctggtccaggaacttagtgggagagaacgactaatctagaccatttcacttcacattctgagcttcttgtacactgtcacactgcatccttttaacaatgcattccctatcctattgcaatactgacatctcatcaatatttt

SEQ ID NO: 278 - DNA, 300 bp, Homo sapiens
ctgacaacttgattgggttctccttcaggtttgaagcgccctcgagaagtgtctaaaggagacagttgatagccaaacaacagttttggattcactgactgattatgaaagaagcagtagactggtatcaagaatcagtcagcaaggaggccctcaccagacgccagtgccatgttcttggacttctcagcctccatattcatgaactaagtttttggaatccttaggcttccacgtgtggaaagcctgagctaacctactggaggatgagccatcacctggagcagattcaggccatcc

SEQ ID NO: 279 - DNA, 300 bp, Homo sapiens
ggtaaacctatttatataatagaaggatgattataaacatttaataaattatatcaaatagatattatatattaaatgggcagataatagaaatctgtccaagcaaaactctggataatttttatgttgccttattttttgttttctgtgaactccaagaaaaatgagataccagtttggaacagatgtaatattgctgatttaacagtttagggatactccccaagttcaataattttgccaagatacaaatttaaatggaaccttttatgaagcttcatagtgtgtgaagaacttacc

SEQ ID NO: 280 - DNA, 300 bp, Homo sapiens
ataactgcttgcgaagatgtagtttctctttggaaagctacacacacgagattatacacatcaggcactggaactatctgtaatactggaacctctgcgaagtgccaggtataaagtttttcccactgccaagcatccagagctttgggaaatttggaaatcagagagatcagggcattgttttgttcctctgatgatgaaagtgaaaagcaagtactactgaagtctggaaatataaaagctgtgcttggcctgacaaagaggaggctagttagtagcagtgggaccctttctgatcaa

SEQ ID NO: 281 - DNA, 300 bp, Homo sapiens
caccatcgaatatttttatttattttgagagacagactctgtcacccaggctagtcttaaactgttggtgaatcttaagtgattctcccacctcagcctcccaaagtgctgggattacaggcatgagccactacccttggctgtgatcaagtatttagtctgttgttaaatgtttactaaatagtctgaagtagagaaaatagcacccaatctaaaataaggtgaggtctagtcacttatttaaatctacattttaagctatagtttactattagtttaaactttaagacaggtaatgtt

SEQ ID NO: 282 - DNA, 300 bp, Homo sapiens
gcaaccttcgcctcctgggttcaagtgattctcctccctcagcatcccaagtagctgggactacaggcacgtgccaccacacccagctaatttttgcatttttagtagaggcagggtttcatcatgttggccaggctggtctcaaactcctgatctcaagtaatctgcccactttggcctcccaaagtgctggcattacaggaatggagccaccgcgcccagcctgatttctttttttaggtcttgtcaggaaagatattgattcttttgattcgtgaacatggtttttggtcgtcttta

SEQ ID NO: 283 - DNA, 300 bp, Homo sapiens
cccaggtagctgagactacccacaccttggtcccagctacttgggaggctgaggtgggaaaatcactttgcccaggaattcaaggccgcagtgagctatgattgcaccactgcactccaggcaacagagtgagaccctgtcttaaaaaaagaagggagaaagtgtcagatggtgatgaggtctgggggggaaatagagaatggggatcaggagtgtggatggtggtattccctcaccaagaggtgacatgtgagcagggagctgggaggtgagggtgtgacccgtgtggaaatcagggaa

SEQ ID NO: 284 - DNA, 300 bp, Homo sapiens
ggtgtcctccccagtgcgccgcgatttttgtgtccaagccccagagtccctctgagaccaacccccagccagcacagacttcctgccttcccagctcggaagcgccctcgagaagtgtctaaaggagacagttgatagccaaacaacagttttggattcactgactgattatgaaagaagcagtagactggtatcaagaatcagtcaggtttttggaatccttaggcttccacgtgtggaaagcctgagctaacctactggaggatgagccatcacctggagcagattcaggccatccta

SEQ ID NO: 285 - DNA, 300 bp, Homo sapiens
aattccgttgctgtcgggccgccatgtcattctggagagagacagagtaaaacaaagaaggtgatgggtaaagcgcagtcgcctgctatatattgtctatttttggtttttcacttaccttttatatttatgtcttttatgtacaacaggattataagtagcttgagtccagtgaatataccatttcattttgctatccttcactgcacttagcttagaggaaataatcacagcttattattgattaattaattaattaatagatgaatggtgaacacatgactatcatcccaagaaatg

SEQ ID NO: 286 - DNA, 300 bp, Homo sapiens
agccaatgaggcttttgcctgccagcagtggacccaagccattcagctttacagcaaggctgtgcagagggcccctcacaatgccatgctttatggaaaccgagcagcagcctacatgaagcgcaagtgggatggtgaccactatgatgccctgagggactgcctcaaggccatctccctaaacccatgccacctgaaggcacactttcgcctggcccgctgcctctttgagctcaagtatgtggctgaagccctggagtgcctggacgacttcaaagggaaatttccggagcaggccca

SEQ ID NO: 287 - DNA, 300 bp, Homo sapiens
gggtgacagagtgaaactcgtatctccaaacaaacaaacaaaaagtccttaaacatatgtgaacaaaaattttgtgatggaaggattctagttaatgagtattgcatcaagatttacatctttcttactaaggaaaagagttaataaaaattgttctttattttacaggcagttactgaggctcttcccagatctcagtaaacagccactcagccttgaaaatggagtgttgttgtttctaaacatatatttatgtcatttattaagtacagttcacttaaataacataagtagattttc

SEQ ID NO: 288 - DNA, 300 bp, Homo sapiens
accactaacagcatctacttgactactgatactttgatcatggagttagggcatgccacttgatagaaatttgaagagcaattatatttttcaaaaagagttttgaataatgttaagatagattgcaacatgactatcaattcttcccttcccatcaaaggagagagtccgtttatccagcctttgaatcttgattattcaagtgacttgcttcacccaatgtaacattaataagcacaatacaagcagaggcttgccaagaacttggtttgtttctaatgcttagaagaagaatggtgt

SEQ ID NO: 289 - DNA, 300 bp, Homo sapiens
  misc_feature (1)...(300): n = A,T,C or G
tgtccttatctgaaattcagcgatcttcatgaataagcatttctctgattgtggnatatgcctttaattttatttctagagtgacaaatttttggttttgacagtttttttctagctttatagtttcttcttggggagagaatatgtcaacctcactccatcatgctgaagtaaatcttcatctcttaattttatctctcaaaaatatcctaaggattccctctggagcctgataagtaattgcagtatctggtttctatggttggatgattcaggattccaggaataatagttactttt

SEQ ID NO: 290 - DNA, 300 bp, Homo sapiens
ggaaccatgagaaccgaagctagaattgctattgaattactttattttctcttcccttattgggtagagatacatcattactggcctcaggggtttacccaaagaaagggtatttttgagcaaataatgtgatttcctggctattttgttgggggcttaagatttttttttttcaaatgcatttttagtcactaaaaattaactgtcgtaccatctagaactatactgtccagtaccatagcctctagccgtatgtagctatttgtattaagattaatggaaattttaaatccagttcct

SEQ ID NO: 291 - DNA, 300 bp, Homo sapiens
tatgattttatttttggcctaatataggaatgtttaaaaaaggcttttctatgaaaattagaaatttatacttgaaattaaaagtctacaagggggaggaccttaaagctaagctaccagtaagacaatgaataattcagaagagaacactattcttttactgactgagtgcccaagatgccaatttccatgaagtcttgatttatatatatgtacacatgttatgcacatacatgtttgttttctaacagttattctttaagcttttgagataattttagacttacagaagagttggaa

SEQ ID NO: 292 - DNA, 278 bp, Homo sapiens
  misc_feature (1)...(278): n = A,T,C or G
cccagacctatggagtcagacagtaggtttgaggcccagcaatctatggtttaacaagccatccaggtgtttctgatgcacagtgaaattggggtaccactggtattaggtttggtatggcaactttttcatcacttgttttatgtagttgtctgatcaattgtgaaaacataatgaatgttggaaatggaacagtaaaataacgaaagccaactttttttttttttttnnnnnnnnnnnnntgntttnncccccaggntgnanngcagggncccaat

SEQ ID NO: 293 - DNA, 297 bp, Homo sapiens
ggaaggcagtgggaggagaggaccaagtctcaaactccagaagccccacctccctgagctcagctcctctgccaagccccctcagcgcgaagtcctcgtccagagaaggcaacggcgagaaacaaatccaacatcctgggctgctttttccttcccccactttttaaaagtttggtgtccaagtcacttgacaaacccagaccctaacaatgatattttgtgtagaattctgggatcaaaatataatttcaaaaataatatattttctgacatcccccaaaaaaaaaaaaaaaaaaa

SEQ ID NO: 294 - DNA, 300 bp, Homo sapiens
ggaacagtttgagcaaaggctctcaagtaatagggtgtctgacttgttcatttttgaaagtagaactaataggatttcttattggaacgtagggtgtaagagaaaagaggagtcaaaaagagccacaagatttttggtctcagcaattagaaggatagaattgacatttactgagatttttgtttttgtttttgagacggagtttcgctattgttgcccaagctggcgtgcaatggcgtgatctcggctcagtgcaacctccacctcccagattcaagcgattctcctgcctcagcctcc

SEQ ID NO: 295 - DNA, 299 bp, Homo sapiens
  misc_feature (1)...(299): n = A,T,C or G
gtaatattgatgtgattgttgtcgcttgagaaaaaaaggcaacagctgattctttcaacaactgtcacagaatggctgggctgagaacgctgcccagggccctgcagctggcgggagnnnnnnnnnnnnnnnnnngtgcntgctgcaacatntggttanatngtatccttccctanagntgctacnncttnnatccccttgtnaatatgttgagntnncttngcnttcnngntnntccngntnnttgacacntatgnaanttntntngtctngctctgctngatnncttnnangctgcc

SEQ ID NO: 296 - DNA, 300 bp, Homo sapiens
gcagaaccttttcccctctactcttgtctaaaagttctgtgtggcacacagagatgcgacctactcaatctgacttagtaaaaccatgctgaaaaattttggtctaaaaaggacccatacccagcacccatgaaataaaagattcatctgtaattgggattcaaagggattaaattcctttggtcatactcataaatagcactaaagtgttataacattttcatttacctatttttagttccttcattttaacttaataaaaatcttggattgatattctttttttttttttttgggacg

SEQ ID NO: 297 - DNA, 300 bp, Homo sapiens
gctaggattacaggtgtgagccaccatgcccagccacttatctttaaaggattaagtttatgtttcctactatgggaaaccatcccaccccaaacttgatgaccgcattatgtgcttttatagaacatggcacttctccaggatagcatttattctgttttgtaagtgtgaatgtaattaccctacacacagcatacacataatcttcatattctttgccttgtcttgtgaaggcaagggccatgtctatcttattcgtcattagattcccacatccaacatagtcctggggacagcacc

SEQ ID NO: 298 - DNA, 300 bp, Homo sapiens
ccaaatctgcctagagattgagttcacagtgtatgttctgggggcgctggtgcagtcagcggtccagtctccagcctgcaggcgtgcacactggggtggacgatgggtggccccgcaggtgtacacatttgggtggccccggcccctataccccagtgttctctttgatccagtcccgaaacagagggagccttgtgtacacgcctccaaagtggagctgggaggtagaaggggaggacactggtggttctactgacccaactgggggcaaaggtttgaagacacagcctcccccgccag

SEQ ID NO: 299 - DNA, 300 bp, Homo sapiens
ctccattgtgaagatccaggcatttttccgagccaggaaagcccaagatgactacaggatattagtgcatgcaccccaccctcctctcagtgtggtacgcagatttgcccatctcttgaatcaaagccagcaagacttctctgctgctgtgatctgcacaccctccaacctgggcagggactggggggatgcagtgtgtgttagtgcccatgtggcattgtggcactgttgccccccatggcggcatgggcaagatgaccttccattagcttcaagtcttgttctcttgtctgtggtctg

SEQ ID NO: 300 - DNA, 300 bp, Homo sapiens
agcaattccactcctagctccacccacaggaattgaaagcaaagacgcaaacagatgcctgtgcaccaaagttcacggcagcatccttcgccatagtggcagcatccgtcgtcacagcggcatcatccttcatcatagcggcagcatccgtcgtcacagcggcagcatccttcgccacagcggcagcatctgtcgtcacagcggcagcatccttcgccaaagcggcagcatccttcgtcatagcggcagcatcctttgccatagcggcaaggtggaaaccctgtccatccactgaggcgt

SEQ ID NO: 301 - DNA, 300 bp, Homo sapiens
tcacagatatgaaagttcagtcagaggggctgggccgacatctgtgcttttccctgcaggatttttaggatcagtgagacggtgtgtatttggaagcatttcaaatgtgttaccatcgtgttacttccgtgggcacctggtgttattggttggactagtcaggattctccagagcagcagaagcaatgggatgtgtgtgcatgtgtttgtgcagagacagaaagagagattttaaggaactggcttatgcagttgtgggggctagcaagtctgaaatttgcagggcgggccagcaagctg

SEQ ID NO: 302 - DNA, 300 bp, Homo sapiens
tcaccaggaatacagtgacattaaaagtgtgatatggtttagctgtgcccccacccacatttcaacttgaactgtatctatctcccagaattcccacatgttgtgggagggacccagggggaggtaactgaatcatgggggctggtctttcccgtgctattctcgtgatggtgaagtctcacgagatctgatgggtttatcaggggtttccacttttgtttcttcattttctcttgccaccagcatgtaagaagtgcctttggtctcctaccatgattctgaggcctccctagccatggg

SEQ ID NO: 303 - DNA, 300 bp, Homo sapiens
gccctctccattttctgaggaggtgatatttgggcagattacaaactgaggaagcatactggatagacatcaggatgaagagaataggcagttgaaaagtcccagaaaggggagtgtgcttagagtgtttgaggaacagcaaggaagcaagcccttgttgaaacagattgagcaaggtagaaagtggtaaaagatgaagttaaagaggtagctgagagccagatcatgtaaagccttggtaaggactgacttttattttaagagggttaggaagacattggtaggttttgactctggctt

SEQ ID NO: 304 - DNA, 300 bp, Homo sapiens
aacaggaatatggaaagaaactcagagccgagttagtggaaaagtggaaagcagagagagaggctcggctggcaagaggagaaaaggaagaggaggaggaagaggaggaagagatcaacatctatgcagtcaccgaggaggagtcggacgaggaaggcagccaggagaaaggaggggacgacagccagcagaagttcattgctcacgtccctgttccctcgcagcaagagattgaggaggcactggtgcgaaggaagaaaatggaactcctccagaagtatgcaagcgagaccctgcagg

SEQ ID NO: 305 - DNA, 300 bp, Homo sapiens
aatagtagaaagggtccccattcctgctcagcaccgcacctctctacccccccacagacacacatgcagacacacacatgcagacaacacgcagacacacacatgcaggcactcacatgcaggcccatgcacacacacgtgcacacacatgcagagacatgcagacacgcaggcacacatgcacacatgcaaagacacgcatgcaggcacacgcagacgcacacagagacacacatgcagatacacatgcacacacacatacacacactggcccctgtttttctgtggtgtcactgggtg

SEQ ID NO: 306 - DNA, 300 bp, Homo sapiens
cagcaaagactttatttttgtacagaagatggtgaagtccaagacggtggctcagtgcgtggagtactactacacgtggaaaaagatcatgcggctggggcggaaacaccggacacgcctggcagaaatcatcgacgattgtgtgacaagtgaagaagaagaagagttagaggaggaggaggaggaggacccggaagaagataggaaatccacaaaagaagaagggagtgaggtgccgaagtccccggagccaccacccgtccccgtcctggctcccacggaggggccgcccctgcaggc

SEQ ID NO: 307 - DNA, 300 bp, Homo sapiens
  misc_feature (1)...(300): n = A,T,C or G
gctgcttctggctggggggtccttggccttcatcctgctgagggtgaggaggaggaggaagagccctggaggagcaggaggaggagccagtggcgacgggggattctacgatccgaaagctcaggtgttgggaaatggggaccccgtcttctggacaccagtagtccctggtcccatggaaccagatggcaaggatgaggaggaggaggaggaggannnnnnnnnnnnnantggccttntgtggcctccaccagcagctntnnannatgacatggagtcccaactgnacgnctccctcat

SEQ ID NO: 308 - DNA, 300 bp, Homo sapiens
agttaagagtgtgaaccctagatttgccatctgaaagtcatgtgtccttcagtgatgcatttaacctctctgtgcctcaaatttctccctctggggtatgttaggagtatacaaattaacacatgtaaagtgcttagaatagattggtactgttaaatatgagctaacgtcacatttgatatttttttaaaaagaaaaaatcattatggagtctcagtcctagagattctgattcattaattctgcttctcggcaaggagcgatttgctggtgtagacattccgggtccgtgtaaagggt

SEQ ID NO: 309 - DNA, 300 bp, Homo sapiens
ccaacacccagttctcactctgtcatccaggctggtgtgcagtggtgcaatgtgggcttactgcagccttgacctccaggacaagtgatctcccacctcagcctccggaatagctgggactacagctcaacaacgcccctctgaaagtaggactcttggaaatgaaccttgttgggagtaaagctgaaccttcacctctcctttccaggattctactccattcatacggcctcacactgaattaatggttctagcagccacatcactttgttacccaattgatctagtagtaaagtcttc

SEQ ID NO: 310 - DNA, 300 bp, Homo sapiens
aggaaacacccccttataaaaccatcatatcaggctgggtgatctgacagagctagacactgtcaaacaaacaaacaaacaaacaaaaaaaccccatcacatctcatgagacttatttactatcatgagagcagctcaggaaacacccactcccgtgattcagttacatcccactgggtctgtcccacaaattgtgggagctacaattcaagatgaggtttgggtggggacacagccaaaccctatcaccatgtaaaataatatctaatttgtagagattaaagaacaagataacttaaa

SEQ ID NO: 311 - DNA, 300 bp, Homo sapiens
  misc_feature (1)...(300): n = A,T,C or G
ttntgcagatctccagcacaagcctctgctagttgatctcacggtagaagaaggtcaaagattaaaggttatgtttggttcacacactggtttccatgtaattgatgttgattcaggaaactcttatgatatctacataccatctcatattcagggcaatatcactcctcatgctattgtcatcttgcctaaaacagatggaatggaaatgcntgtttgctatgaggatganggggtgnatgtaaacacctatggccggataacnaaggatgtggtgctccaatggggagaaatgcccac

SEQ ID NO: 312 - DNA, 275 bp, Homo sapiens
  misc_feature (1)...(275): n = A,T,C or G
cctccctggatgtgcagacatggaggaggacagaaggcccagctcagtggcccccgctccccaccccccacgcccgaacagcaggggcagaggcagnnnnnnnnnntaagngtgtnnaantntnnatttnttcctnttttttttnnnttnaaatatnntgnnnttttttnntantanttattatnntntnnttattannntntttttcntntnttactttgttnttgattttanncntttnatnttttttttgttcttctnttntattnnatctt

SEQ ID NO: 313 - DNA, 300 bp, Homo sapiens
tcctgtcttcttgcccaaatgttgcattttccaagaccactctggcctgccatgccacccattctgtgcctataaaaaccctgagaccccagcgggcacacacacaagcggctggacgtcaagaggaacacactggcagaagaacacatcgaaagacgctggcaggccattgatggtggaacgattcggacgccaagggaaattcggccaaggacagtaggagatcccggctgctgagcagccagactccagaggaagactaccttcccatgctatcccccttctggctccccagccatc

SEQ ID NO: 314 - DNA, 300 bp, Homo sapiens
ataagggtggggccttaattcagtagaattggtggcctcctaagcagaggaagagagatttttctttctctctctgccatgtgaagacagtgaggagtcggccgtctgcaagccaagaagagcccttatcaggaacagacttggctagcaccttcatcgtggacctccagcctccagaattgcaagaaaatacatttccgtcgttgaaaccacccagtctgtggtattttgttatggcagcccaggcagactaatacgtgaagcctgctctaaatagataaaataagaaattactacaga

SEQ ID NO: 315 - DNA, 300 bp, Homo sapiens
gtctcagtgtggcctgtggggctggtgggcggcctgcgattcgagggccctcaggtacaggacggccgggtagtgggcttccacacagcatgggagcccagcaggcccttccctgtggatatggctggatttgccgtggccctgcccttgctgttagataagcccaatgcccaatttgattccaccgctccccggggccacctggagagcagtcttctgagccaccttgtggatcccaaggacctggagccacgggctgccaactgcactcgggtactggtgtggcatactcggacagag

SEQ ID NO: 316 - DNA, 300 bp, Homo sapiens
gaaatgcctctatgtaggtgaagtgttctctctgcatgcaacaggaaaaattaatataatattttccccacaaaagaaacacttaacagaggcaagtgcaatttataaatttatatctaaaggggaatcatgattataagtccttcagcccttggactctaaattgaggggattaaaaagaatttaaaataattttgaacgaatttattttcccctcagtttttgagggcattaaaaaggcattaaatcaagacaaatcatgtgcttgagaaaaataaaattaatgaaaacacagcactt

SEQ ID NO: 317 - DNA, 295 bp, Homo sapiens
acactgtcccactccatcacccaggctggagtccagtggtgtgatcatagctcgctgcatcctccagttcctgggttcaagccatccctcctgcctcagcctccccagtagctggaactacaggtgtgtgccatcacacctggctttacatttttctgtggggacttactatgttgcccaggccggcctcaaactcctgagctcaagtgatcctctgcctcagcctccagagtatctgggattacatatgtcggctaccgtgtctggccgttcacatctttggccactatttgct

SEQ ID NO: 318 - DNA, 261 bp, Homo sapiens
  misc_feature (1)...(261): n = A,T,C or G
cctgaatataaagaggaggaggaagaccaagacatacagggagaaatcagtcatcctgatggaaaggtggaaaaggtttataagaatgggtgccgtgttatactgtttcccaatggaactcgaaaggaagtgagtgcagatgggaagaccatcactgtcactttctttaatggtgacgtgaagcaggtcatgccgacccaagaannnnnnnnnnnnnnnnnnntngccnnaacnnttcaccaaatnccccgggggggcttg

SEQ ID NO: 319 - DNA, 300 bp, Homo sapiens
gggacctctgcccaagaaagcctgggtattgaccaaggtttcccccccactgagacagcctgagatatggcctcatgggaagggaaagacctgactgtcccccagcccgacacctgtaaagggtcggtgctgaggaggaatagtgaaggagggaggcctctttgcagttgagataagaggaaggcttctgtctcctgcttgtccctggtaatggaatgtctcggtgtaaagctgaccattcccattcgttctattctgagataggagaaaaccgccctgtggctggaggtgagatatgct

SEQ ID NO: 320 - DNA, 289 bp, Homo sapiens
  misc_feature (1)...(289): n = A,T,C or G
caccttgcctggccaaggggctagacctcccaggctaagcctcagattcagtgcaggacacaagctcatgcccccgtcttgccagtgacacttgaagcctcccgacttccacagagtgcttcaggacacattttgagtggtattttcttttctttttttcttctttttttttttnnnnnnnnnnnntngttntgtnncccaggctgnanngcaggggcctgatntnggntaantgnaaccttngcctccnaggttaaagcnattttttngcctaancctcnaaagtacc

SEQ ID NO: 321 - DNA, 300 bp, Homo sapiens
gaaagaccgagatagagagagagacagagacagagagcgagaccgtgatcgggacagagaaagagaacgcaccagagagagagagagggagcgtgatcacagtcctacaccaagtgttttcaacagcgatgaagaacgatacagatacagggaatatgcagaaagaggttatgagcgtcacagagcaagtcgagaaaaagaagaacgacatagagaaagacgacacagggagaaagaggaaaccagacataagtcttctcgaagtaatagtagacgtcgccatgaaagtgaagaaggaga

SEQ ID NO: 322 - DNA, 300 bp, Homo sapiens
cgccctttaactgcagttctgctctattttcttttctctctctggagctgagagtcagagggcccttctcctcctcctttcagcccccaacactaagctgatggattgataaatacctcagcccctcgccttcctcaacccacctggcaagtcttcttaggatctgatcccagttttctggaagcaatcctaccccagcccaagcttcccaagagtcgagccttaatccttctcacttctcagtgtcagagcagaaatgaatcctggggttgactgtgtccattcgggttattagcagct

SEQ ID NO: 323 - DNA, 300 bp, Homo sapiens
agattatgagcatgtagaagatgaaacttttcctcctttcccacctccagcctctccagagagacaagatggtgaaggaactgagcctgatgaagagtcaggaaatggagcacctgttcctgtacctccaaagagaacagttaaaagaaatatacccaagctggatgctcagagattaatttcagagagaggacttccagccttaaggcatgtatttgataaggcaaaattcaaaggtaaaggtcatgaggctgaagacttgaagatgctaatcagacacatggagcactgggcacatag

SEQ ID NO: 324 - DNA, 300 bp, Homo sapiens
gtctgagaagtcaaggatcggggtgctggcctattcagttcctggtaagggctgtcttcctggcttgcagttgaactacttcttgctgtgtcttcacaagcatgcccccatcctgtgccgataagaactccagaccccaaactcagctcatacacacacggaagagagaagcatctgaacatcaagaagagaagaagctgctggacatcagaaactgtgaaaggagaggagtttggctgagctccaggggaagactgcctgcacattctatccccttttcagttccccatcctgctgtca

SEQ ID NO: 325 - DNA, 283 bp, Homo sapiens
  misc_feature (1)...(283): n = A,T,C or G
gtccgaagaaaaagactgtggtggcggagatgctctctccaatggcatcaagaaacacagaacaagtttgccttctcctatgttttccagaaatgacttcagtatctggagcatcctcagaaaatgtattggaatggaactatccaagatcacgatgccagttatatttaatgagcctctgagcttcctacagcgcctaactgaatacatggagcatacttacctcgtccacaaggccagttcactctctgatcctgtggaaaggatgcnngtgtgtagctgc

SEQ ID NO: 326 - DNA, 300 bp, Homo sapiens
atgacatcctcattatccacactgcaaagccaaccatccctatgatgggttcattgtggatcatgacttagtgggtcaagagtttggaagtggctcagctgggcggttcttctgctccatgtggctgccagatggtaccctgctggtgggcagtctggtctagagggtccatgatggctttactcacatgcctggcatcttgacagggacagctggaaggcaaggttcagctgggactgtccacagagctcctccctgtggcctttccagcatggtggtctcagggtagctggacttcct

SEQ ID NO: 327 - DNA, 300 bp, Homo sapiens
ggtagactggctagggatcctggacccagggttccacgtagcaacacctgctgagttctctgggttttcttcctgcctcatgtagcccagacttggagctgaagaagctggaaacatggaaacaccaacagctacagaccaaaaaaagtcccaacaaaggcctgtcagtctgccagcctgttctgtggatttccaactcaagattgcagcatcaactcacacctgaagttctggcttccctacaaactttgaacttgccagtccccacaatggcataagccaattccttaaaatgaatgt

SEQ ID NO: 328 - DNA, 300 bp, Homo sapiens
gtcacaggcaggtttaatggccagtttaaaacttatgctatctgcggggccattcgtaggatggtgagtgtttccctgggctttgctcatcacttcgggacatcgtggactttaccgtgcgcattggagtgtgtgatggtgcctgagtagatctgctggcagagtagtttgagccagctggactgggctggccgcctgccgcttcttgagggtggaagaggggtgctctgagaagacactcaggcagcagactctgcctctcacttaaggtgcccccccgaccccgctccaccatagtca

SEQ ID NO: 329 - DNA, 300 bp, Homo sapiens
ttttggtcgtctttaatttgtctcatcagtgcctccatgtgtttttgatgcctttgaactggtatttttaaaatttcaatttctaattgttcattatagaaacacaattgggttttatatattggcattgtattttgcaactttcctaaactcactagtaattctagtagctttttttggtagattcttaaggattttctgtgtaaatagtcatgtcatttgtgaataaagccatttttttttccttttcaaattttgtgccttttatttcttattcttaccatatcacattggcaaaga

SEQ ID NO: 330 - DNA, 300 bp, Homo sapiens
tcaaggatcggggtgctggcctattcagttcctggtaagggctgtcttcctggcttgcagttgaactacttcttgctgtgtcttcacaagcatgcccccatcctgtgccgataagaactccagaccccaaactcagctcatacacacacggaagagagaagcatctgaacatcaagaagagaagaagctgctggacatcagaaactgtgaaaggagaggagtttggctgagctccaggggaagactgcctgcacattctatccccttttcagttccccatcctgctgtcagccacattta

SEQ ID NO: 331 - DNA, 300 bp, Homo sapiens
accgccctgtggctggaggtgagatatgctggcagcaatactgctctgttactccttgctacactgagatgtttgggtaaagagaaacataaatctagcctacgtgcacatctgggcacagtacctttccttgaacttattcgtgatacagattcctttgctcacatgtttccctgctgaccttcttcccacctgttgccctgctacactcccctcgctaagacagtaaaaataatgatcaataaatactgagggaactcagaggccagcgccggtgcgggtcccccccatgctgagcgc

SEQ ID NO: 332 - DNA, 300 bp, Homo sapiens
ggaaaaacaacaggtttgagtcctataaagccataatttaactccagtagctgatgtcagacaagcttgtcctatgtcctatttgagtggcagcagcgccagcccagcaagaaggctgggggttgtcaaggttgtccccagaccttgcttgcagtggttggagaacccagggggctgccttgggccctctggccagagggaagcgggcagctctagccctggagattgtggtcacattggggcttgtttaggattggagggccaggtcacctccccagccaccctcccttctctcctctg

SEQ ID NO: 333 - DNA, 300 bp, Homo sapiens
cctcctactcccaaacaaatctttggggaaaaaaaaactaccaactgtcagccatgggcctgacggcgctaagctctggggctccgtgcactgacgtggggccagccacagggaggcggggatcaagtagcggaggccaggattttggccacctcccgggcaagttgcagggcagtggcgccgggagcaaaagcagcatgatgcagctcatgcacctggagtccttttatgaaaaaacctcctcctgggcttatcaaggaagatgacactaagccagaagactgcataccagatgtacca

SEQ ID NO: 334 - DNA, 262 bp, Homo sapiens
gccatgcccatttgtttactcattgtctatggttgctttcatgccctcacagcaaaggcgagtagttgtgatggatcaaatggcccacaaagcctgaaatatttactctttgaccctttacagaaaaaaaccttgttgacccctgctttagagaatgagaagccatgcagggatcagtgatgccagaggaagggaaggaactgcttccagctattgtgacaataataataataataatattgggtctttgactagaacgtgt

SEQ ID NO: 335 - DNA, 300 bp, Homo sapiens
  misc_feature (1)...(300): n = A,T,C or G
tcntntctcnntattnttgngtagtncctcntttccttgtncnntnntcnnctnttgncttttgcggaccctcgattctatctcatatgagtgagaacgcttaccagtgcagcgaatgtgggaaagccttccgagggcactcggacttttctaggcatcagagtcaccacagcagtgagaggccttatatgtgtaatgaatgtggaaaagccttcagccagaactcgagccttaaaaagcaccaaaagtctcacatgagtgagaagccctatgaatgcaatgaatgtgggaaggctttta

SEQ ID NO: 336 - DNA, 300 bp, Homo sapiens
gaggacccactcccccaggactcctttgaaggcgtggacgaggacgagtgggactagcctgcgcccccgtcacctccacctcacctgtgctgccacttcctagtgcacacctcacggctcatcctcaagctggaagatacctctctggccccggcacatgtcacccctgcactcctgccttcccgtgggcacttccacatcctctgggcctctggcagttcccagggactgttttcacctctgctgtctctggggtcagctgctgctcatcagctgcccgctagcatgtggccaggggtg

SEQ ID NO: 337 - DNA, 300 bp, Homo sapiens
agacaacccagaaacaaattcatacatctatggtgaccacttttgacaaaggaatgaagaacatacactggggaaaagataatgtctttaataaatggtgctgggaaaactggatatccatatgcagaagaatgaaactagacccccatctcttagcatatacaaaaatcaaaattaattaaaaagttaaatctaagacctcaaactatgaaacagctaaaagaaaacatcggggaatctctccaggacattggagtgggcaaagatttcttgtgtaatacctgacaaacaggcaaccaa

SEQ ID NO: 338 - DNA, 292 bp, Homo sapiens
tcaataaccatgaagatgcatcctaccaccgtcagggcaatcattagatagctgatcttcactcgcatcttcatggttattgagggcaagaaggctgcccaaagacacgagactttaacaagcttgaacttagaaaagaaagctcgtctgaaagaggaagcagctatgaaggccaaaacagagtagcagaggtatccgtgttggctggattttgaaaatccaggaattatgttataacgtgcttgtattaaaaaggatgtggtacgaggatccatttcataaagtatgattt

SEQ ID NO: 339 - DNA, 300 bp, Homo sapiens
gaaatttgcactgatggctcagaaggcttacgtcatggagagtatgacctacctcagagcagggggggctggaccaacctggctttcccgactgctccatcgaggcagccatggtgaaggtgttcagctccgaggccgcctggcagtgtgtgagtgaggcgctgcagatcctcgggggcttgggctacacaagggactatccgtacgagcgcatactgcgtgacacccgcatcctcctcatcttcgagggaaccaatgagattctccggatgtacatcgccctgacgggtctgcagcatg

SEQ ID NO: 340 - DNA, 300 bp, Homo sapiens
  misc_feature (1)...(300): n = A,T,C or G
ctcagngcancgatcatggctcagtgcagcctcaaactcttgggctcaancanagcgggnacctcaacctcctgagtagctaggactataggcacacagcaccatgccccggctatttttttattttgtagagatggggtctcactatgttgcccaggctagtcttgaactcctggcctcaagcaatcctcccacctcggcctcccaaagtgctgggattaaaggcgtgagccaccgtacctggcccttggtggaatctttagggttttctattcatacatataaaatcatatcattggc

SEQ ID NO: 341 - DNA, 296 bp, Homo sapiens
  misc_feature (1)...(296): n = A,T,C or G
atccaggtgtttctgatgcacagtgaaattggggtaccactggtattaggttgggtatggcaactttttcatcacttgttttatgtagttgtctgatcaattgtgaaaacataatgaatgttggaaatggaacagtaaaataacgaaagccaacttttttttttttttttttnnnnnnnnnnnnnnnnnttnncccccngncngnanngcaggggcccaanntnggntnnntgnanccnccnccnccgggntnnncccctttntcnngcctaacccncccnagnacnnggaactac

SEQ ID NO: 342 - DNA, 300 bp, Homo sapiens
ggcacgatcatggctcattgcagcctctaactccggggctcaagcaatcctcccacctcagcctaccaagtagctgtgaccacagctgcccctcaccatgctaagctaatttttttaattagatagtacataaacgtcccaaaattagaagataaaaagacatgagggatccattctaatttgtgtttggagtgtaatggtccagctccattcttctgcacatggatatccagttttacacaacactgtgaatgtaatgaatgccactgaatcatacactcaaaaatagctaaaatggca

SEQ ID NO: 343 - DNA, 300 bp, Homo sapiens
gttttcatcactacatattctacacacactgggaagctctgacaacttattccctgctattatcaactaaagatcaccctttctactgctgtctctggagcaggagctggcaaactatggcctgctgtctgtttttgtacagttttactgaaacacagccatgcccatttgtttactcattgtctatggttgctttcatgccctcacagcaaaggcgagtagttgtgatggatcaaatggcccacaaagcctgaaatatttactctttgaccctttacagaaaaaaaccttgttgacccc

SEQ ID NO: 344 - DNA, 300 bp, Homo sapiens
ccccaacctgcactctacccacccccatcacctactccagctcccaacttttgtggactgagcggccgcagagactgggtcgccttggattccctctgcctccgaggaccccaaaagacacccccaaccccaggccagccggccctgctctggcgcgtccaaaatactacctagcacaggcctctgctcgaggcacccccaaactacctatgtatccagccccagagggcctccattcccaggaagtccctatgtatcccaacactggcagacacccagcaccaccctcccagacccgca

SEQ ID NO: 345 - DNA, 300 bp, Homo sapiens
cccccatcacctactccagctcccaacttttgtggactgagcggccgcagagactgggtcgccttggattccctctgcctccgaggaccccaaaagacacccccaaccccaggccagccggccctgctctggcgcgtccaaaatactacctagcacaggcctctgctcgaggcacccccaaactacctatgtatccagccccagagggcctccattcccaggaagtccctatgtatcccaacactggcagacacccagcaccaccctcccagacccgcaagaaagtgaatctcactacta

SEQ ID NO: 346 - DNA, 300 bp, Homo sapiens
gtccacggtgctgaacatcatcatctttgaagactgtaggaaccagtggtctatgtcccgaccactacttggcttgatattgcttaatgaaaagtatttttctgacctaagaaacagtattgtgaacagccagccaccggagaagcagcaggccatgcacctgtgttttgagaacctgatggaaggcatcgagcgaaatcttcttacgaaaaacagagacaggttcacccagaacctgtcagcattccgtcgagaagtcaacgactcaatgaagaattccacttatggcgtgaatagcaa

SEQ ID NO: 347 - DNA, 300 bp, Homo sapiens
gctctgagcccaggcgaggccagggacatggccatggacctgtgtcggcaggaccccgagtgtgagttctacttcagcctggacgccgacgctgtcctcaccaacctgcagaccctgcgtatcctcattgaggagaacaggaaggtgatcagaccccatgctgtcccgccacggcaagctgtggtccaacttctggggcgccctgagccccgatgagtactacgcccgctccgaggactacgtggagctggtgcagcggaagcgagtgggtgtgtggaatgtaccatacatctcccaggc

SEQ ID NO: 348 - DNA, 300 bp, Homo sapiens
gttctgtggctggcatggtctgcctgctactggagagatctcctgagaattcaggtttggattggtgctgtcatcttcctgggaatgcttgagaaagctgtcttctatgcggaatttcagaatatccgatacaaaggagaatctgtccagggtgctttgatccttgcagagctgctttcagcagtgaaacgctcactggctcgaaccctggtcatcatagtcagtctgggatatggcatcgtcaagccacgccttggagtcactcttcataaggttgtagtagcaggagccctctatctt

SEQ ID NO: 349 - DNA, 300 bp, Homo sapiens
  misc_feature (1)...(300): n = A,T,C or G
gtcagcttttgatgaagctatgtcatactgtcgatatcatccttccaaagggnattggtggcacttcaaagatcatgaagagcaagataaagtcagacctaaagccaaaaggaaagaagaaccaagctctatttttcagagacaacgtgtggatgctttacttttagacctcagacaaaaatttccacccaaatttgtgcagctaaagcctggagaaaagcctgttccagtggatcaaacaaagaaagaggcagaacctataccagaaactgtaaaacctgaggagaaggagaccacaaa

SEQ ID NO: 350 - DNA, 270 bp, Homo sapiens
  misc_feature (1)...(270): n = A,T,C or G
ccatgctgntaacgggtttcaaggggactcttgaggaantgccccctaaaatagaacacagcaatanggngggcttcctgtccccaggnccaccccacagtgctntntggcactggnaactctgctanggagngantgnannnnaccantaannnnnnannnatcnacannnnnnnnncnnnnnnncntntnnccnannnntannctnccntannnnanccnnccannancactcncnatnaacgnnnnnttantgagannttctcaact

SEQ ID NO: 351 - DNA, 300 bp, Homo sapiens
aaatgactccctgcaaaacccaacccatgctgctggctgtgggatttttggtgtaagcctatctatgcactctatcagccagaatttggcatttagctcttagttaaatctagtaaaggacagtctattgtttaaagagaaggtgcatttgttcctcaatcaagcaagagcacctgtgttgtactgctttatatctcatgtatatttatagtaatgaaaagactttttaaattgtacacgtttcagtgcctttcttgtgttatgaaaggcaggtagatattatagccataggtaaaaatc

SEQ ID NO: 352 - DNA, 300 bp, Homo sapiens
aagaaatgcctctatgtaggtgaagtgttctctctgcatgcaacagtaaaaattaatataatattttccccacaaaagaaacacttaacagaggcaagtgcaatttataaatttatatctaaaggggaatcatgattataagtccttcagcccttggactctaaattgaggggattaaaaagaatttaaaataattttgaacgaatttattttcccctcagtttttgagggcattaaaaaggcattaaatcaagacaaatcatgtgcttgagaaaaataaaattaatgaaaacacagcac

SEQ ID NO: 353 - DNA, 300 bp, Homo sapiens
cccacactcggacactgtggaattctaccagcgcctgtcgaccgagacactcttcttcatcttctactatctggagggcactaaggcacagtatctggcagccaaggccctaaagaagcagtcatggcgattccacaccaagtacatgatgtggttccagaggcacgaggagcccaagaccatcactgacgagtttgagcagggcacctacatctactttgactacgagaagtggggccagcggaagaaggaaggcttcacctttgagtaccgctacctggaggaccgggacctccagtg

SEQ ID NO: 354 - DNA, 299 bp, Homo sapiens
  misc_feature (1)...(299): n = A,T,C or G
gaaggaggacctaggcacacacatatggtggccacacccaggagggtagtggggagttagatttcagagtccaggccctaggttgggacccactccaaataatctcctcggtgtgggtggtggttctatagagggataaatgaataataaacattgttaaaatatacgaaaaaaaaaaaaaaaaaaaaaaaaaaaaaaaaaaaaaaaaaaaaaaaaaaaaaaaaaaaaaaaaaaaaaaaaaaaaaaaaaaaaaaaaaaaaaaaaaaaaaaaaaaacnncnncnananaaaaaaaaaaaa

SEQ ID NO: 355 - DNA, 300 bp, Homo sapiens
actgttcatcctaagttccactataaacaggctcatgactcgggcacagacacttcttgcgtgactttttcctatgatggtaatgtccttgcctctcgtggaggtgacgattcattaaaattatgggacatccgacaatttaataaaccacttttttcagcctcgggtcttcccaccatgttcccaatgactgactgctgtttcagtccagatgataagctcatagtcactggtacatctattcaaagaggatgtggcagcggcaaacttgttttctttgagcgtaggactttccaaagg

SEQ ID NO: 356 - DNA, 300 bp, Homo sapiens
ttcagaaagaaacatttaatagggacttacaaacaaattaatgtctgagtctcaggtggcagcaagacaagatggtggatccccatgccattacctgctagactcagggtttatatactgtagtggagaggtgattccgaaggaatgttgtaagacaattgaagagcagtaacatcaaagttatttgacctaagggcaggagttacagtaagtatccacttttatacaagaaacaatagataaactggaaatcttggagcccttcctggaactggggttaatgagaagtcaacatggtgg

SEQ ID NO: 357 - DNA, 300 bp, Homo sapiens
acaaaacctacagatggagataaaaattactactgttattcaacatgtgttccagaaccttattttggggagtaaagtcaattgggcagaggatcctgcccttaaggaaattgttctgcagcttgagaagaatgttgacatgatgtaataagaattcatttctgacatattttacatttctggcaatctcaactcttatttggaatacttctgtgcatttgtctgtccaccgtaattttagaaaagcatatccataacgtttacagttgtagtacagttgtggttagttatttgtagtgg

SEQ ID NO: 358 - DNA, 300 bp, Homo sapiens
ggtgattacagaagcccagaaggttgataccagagccaagaacgctggggttacaatccaagacacactcaacacattagacggcctcctgcatctgatggaccctgcacttgatggaccagctggcaccacccagatcaataaactggcttatttgaatttgcggccccccacccaggaactgactcagtgcaagaagacagcttcgactccctgtgatttcatctctgaccaatccgcactcctggctcactggcttccccaacccatgaagttttccttaaaaactctgctcccgaa

SEQ ID NO: 359 - DNA, 300 bp, Homo sapiens
  misc_feature (1)...(300): n = A,T,C or G
atcaggtgttcctcccatggcaggagggaagaaacccagcaaacggccagcctgggacttaaagggtcagttatgtgacctaaatgcagaactaaaacggtgccgtgagaggactcaaacgttggaccaagagaaccagcagcttcaggaccagctcagagatgcccagcagcaggtcaaggccctggggacagagcgcacaacactggaggggcatttagccaaggtacaggcccaggctgagcagggccaacaggagctgaagaacttgcgtgcttgngtcctggagctggaagagcg

SEQ ID NO: 360 - DNA, 300 bp, Homo sapiens
tctgtctggtgatttttattttaagtgaacctttggatctatctttaactctctttattgtgagtggtaaattccaattctgcagcagatcagtaaactcacagtatttttcctgtggaaatctattcaataaggaaaccaagacaggataataaaatttaaaaaaaaacaactttgaattcccctgcctaggtcttccagttgttttccagcgcatacctcaggtatgactttgctagccggggacaaaattagcaccttccgattctctagtccaaatgaactttgtgctaaataaaa

SEQ ID NO: 361 - DNA, 300 bp, Homo sapiens
gtagaacagaaaatgagcatccgatttcttcactaaaggagaccaaactgttccttgcggtctagtattgaagaactggaacttgaaagtcctccttctaccaactccacctccaccccctcattccccttctcccaaagtactactgctgttgcatgacaaccccaaatatgttctgtcaacacaaacctgcctttggtgtataaacagggcattacagaatggtacaccctatatatttctgttcagtatccattcactagttcttcatttataaatatcatcttccccattctgctg

SEQ ID NO: 362 - DNA, 300 bp, Homo sapiens
actaccccggctacggttcccccatgcctggcagcttggccatgggcccggtcacgaacaaaacgggcctggacgcctcgcccctggccgcagatacctcctactaccagggggtgtactcccggcccattatgaactcctcttaagaagacgacggcttcaggcccggctaactctggcaccccggatcgaggacaagtgagagagcaagtgggggtcgagactttggggagacggtgttgcagagacgcaagggagaagaaatccataacacccccaccccaacacccccaagacagc

SEQ ID NO: 363 - DNA, 271 bp, Homo sapiens
  misc_feature (1)...(271): n = A,T,C or G
ggcaattagcctcgcttaagttgccttttttacacaccaaaactttttacatgaagggctggtttcacatgaatactatactgaaatctgtgctctcaagatctagcagtgaccagggctgcccggcgggggctctcctggcaagtcaggaaggtnnnnnnnnnnnnnnnnnnnnnnnnncanattantnnctgatcntctntnangaannnngantngctctnttggncnttgtnnnnngncntnnnntnaantntttnntnatgtngct

SEQ ID NO: 364 - DNA, 300 bp, Homo sapiens
agaggaccctgcagttagggggtgttactttgtcgcccaggatggcctggacccccaggttcagggattctcccgccgctgcttcctgagtagctgggacctcaggcttccgcctcgtgcccgcatccctgctgtgtttaggcagcaggtggtgacctcactcctccctggcctgagctctccgtcccgcatcccaggcggaggccctagggaacactttgaagctgagcacggggtggaccctccctcctgagtgaatggagaatagaaagggagaggatttctgttctgttctgtggg

SEQ ID NO: 365 - DNA, 300 bp, Homo sapiens
gttcttcaaagccaaccaagacaggcttagcagttttagagcttcagaacaaattgccaaaagccagagttgtttatgctagtgcaactggtgcttctgaaccacgcaacatggcctatatgaaccgtcttggcatatggggtgagggtactccatttagagaattcagtgattttattcaagcagtagaacggagaggagttggtgccatggaaatagttgctatggatatgaagcttagaggaatgtacattgctcgacaactgagctttactggagtgaccttcaaaattgaggaag

SEQ ID NO: 366 - DNA, 300 bp, Homo sapiens
gccagtcctcaccttccctagtcctcgtgtgtattttaggagatgcgtgggtgtggaacagcctcctgcctccggtccaggtgtactggggtctgtgtgttgtgtttctgcgtgttctcggcagaaagtggcatgctgtcccgcctgggtgatttgctcttttacactattgctgaaggacaggaacgaatccctatccacaagttcaccactgcactaaaggccactggactgcagacatcagatcctcggctccgagactgcatgagcgagatgcaccgcgtggtccaagagtccagt

SEQ ID NO: 367 - DNA, 300 bp, Homo sapiens
cattgccagagagcggtttcagcaagctgcagatctgattgatgctgagcaacgaatgaagaagtccatgtggggtcagttctggtctgctcaccagaggttcttcaaatacttatgcatagcatccaaagttaaaagggttgtgcaactagctcgagaggaaatcaagaatggaaaatgtgttgtaattggtctgcagtctacaggagaagctagaacattagaagctttggaagagggcgggggagaattgaatgattttgtttcaactgccaaaggtgtgttgcagtcactcattga

SEQ ID NO: 368 - DNA, 300 bp, Homo sapiens
gcccggcccggcgacgctggcgacgctttcgcccctgaggtagtttggcgaccgcgaagaaggaaaaagggcgggcgggcggctgtcctctcaccgtcctcaccccgcgaggcccggcccgctcctccgtcgtggatttcgcggcgatccccccggcagctctttgcaaagctgcttgaaacttctcccaaactcggcatggatacgactgcggcggcggcgctgcctgcttttgtggcgctcttgctcctctctccttggcctctcctgggatcggcccaaggccagttctccgcaggt

SEQ ID NO: 369 - DNA, 300 bp, Homo sapiens
gtggggtgtgcctcgtgtgcgtggattcgtgtgtgtgtgtgtgtcttgtatatgtgtgcgcagagtgcatcattttcagactctactatttccgtcaagtattctgtttgatttggatcatctcaggatcggattctgttttagagtgtttctgggccaggatccgggcccctgccctcctctgcacctgaccacactccctactcagggctagtctgttcttcccggacatcttctggtagccgtgcaggagagggctgggtggggcagaggccacagaggggacctggtgtgtcacct

SEQ ID NO: 370 - DNA, 273 bp, Homo sapiens
  misc_feature (1)...(273): n = A,T,C or G
cagaggctggttcagaaaaggaggaagaggcccggctggcagccctggaagagcagaggatggaggggaagaagcccagggtgatggcaggcaccttgaagctggaggataagcagcggctggcccaggatgaggagagtgaggcctagcgcctggccattatgatgatgaagaagctnnnnnnnnnnnnnnnnnnnnncatcatgtccnntgcatggctacctatcccatatttnatntccctnncgttgnttcnaattncacattntcttt

SEQ ID NO: 371 - DNA, 300 bp, Homo sapiens
gatgaggagtgtttaatcattgatacagaatgtaaaaataatagtgatggaaagacagctgttgtgggttctaacttaagttccagaccagctagtccaaattcttcctcaggacaggcttctgtaggaaaccagactaatactgcttgtagtcctgaagagtcatgtgttttaaaaaaacctatcaaacgagtatataaaaaatttgatccagttggagagattttaaaaatgcaggatgagctcttaaagccaatttccagaaaagtaccagaattgcccttaatgaatttagaaaat

SEQ ID NO: 372 - DNA, 300 bp, Homo sapiens
gggccccaatgcagctgccctctccagatacctggcagcctcatatatcagccaaagcctggctcggcggcaggggcctgggggaggggcccccgcagcctcccggggctcctggtcctctgctcccacgtcacgggcatcttcgccgcccccccagccccagccaccacctcccgcagccaggcggctcagctatgccacgacggttaacatccacgtgggcgggggtgggcggctgcggccagccaaggcccaggtccggttgaaccaccctgctctcttggcctccacacaggaatc

SEQ ID NO: 373 - DNA, 300 bp, Homo sapiens
accctttctgccttctgtttgggacccagctggtgttctttggtttgctttcttcaggctctagggctgtgctatccaatacagtaaccacatgcggctgtttaaagttaagccaattaaaatcacataagattaaaaattccttcctcagttgcactaaccacgtttctagaggcgtcactgtatgtagttcatggctactgtactgacagcgagagcatgtccatctgttggacagcactattctagagaactaaactggcttaacgagtcacagcctcagctgtgctgggacgaccc

SEQ ID NO: 374 - DNA, 300 bp, Homo sapiens
tcaaggcctacgaacaggtgatgcactaccccggctacggttcccccatgcctggcagcttggccatgggcccggtcacgaacaaaacgggcctggacgcctcgcccctggccgcagatacctcctactaccagggggtgtactcccggcccattatgaactcctcttaagaagacgacggcttcaggcccggctaactctggcaccccggatcgaggacaagtgagagagcaagtgggggtcgagactttggggagacggtgttgcagagacgcaagggagaagaaatccataacaccc

SEQ ID NO: 375 - DNA, 300 bp, Homo sapiens
cttcagtgcacacaacaggagagaggagaaagaagaaacgctagtaattccaagcactggaattaagttgccttcatcagtgtttgcttcagagtttgaggaagatgttgtgattgttaaataaagcagctccagtttcaggacctcgactggattttgatcctgacattgttgcagctcttgatgatgattttgactttgatgatccagataatctgcttgaggatgactttattcttcaggccaataaggcaacaggagaggaagagggaatggatatacagaaatctgagaatgaag

SEQ ID NO: 376 - DNA, 300 bp, Homo sapiens
gggagactggggtctatttcacccctgcagtctcgaccataagagatggctacacccaggggggccagttcagagacccactcccaggtgtgcattctctttctcaaggatgttccttgctgagaaaaagaattcagtgatatttctcccatttgcttgtgaaagaagagaaatgtggctttgttccacctggctcaccggcggtcagaatttaaggttatctctcttgtttcctaaacattgctgttatcctgttcttttttcaaggtgcccagatttcatattgctcaaacacacatg

SEQ ID NO: 377 - DNA, 300 bp, Homo sapiens
gatcagcccacctcggcctcacaaagtgctgggattacaggcgtgagccaccttgcccagcccacatcatacagtttgaaatgaaactttgccacaaccagcctttgctgtagcacacacatatatcactgaacctgtttgaaataaagttttttttctttttcctctggtattctgggttctgaagtctggtattctggtattctgggttcaaaagtatgacttgagagtgttgctctggtattctgagagttgctctgtattctgggttctgaagattatttgaaaaataactcctac

SEQ ID NO: 378 - DNA, 300 bp, Homo sapiens
tcgctgtgatccaaggataaaaaagttcaaggaagaagaaaaagccaagaaagaagcagaaaagaaagcaaaagcagaagctaaacggaaggagcaagaagctaaagaaaaacaaagacaagctgaattagaagctgctcggttagctaaggagaaagaagaggaggaagtcagacagcaagcattgctggcaaagaaggaaaaagatatccagaaaaaagccattaagaaggaaaggcaaaaacttcgaaactcatgcaagacctggaatcatttttctgataatgaggcagagcgggt

SEQ ID NO: 379 - DNA, 300 bp, Homo sapiens
acactatagaatacaagctacttgttctttttgcaggatcccatcgattcgaattcggcacgaggcagcttcgagccaatggtgagctccttctggatcagctccttcagctccttcttgctcaggatgctgaaattgcaaggctgatggaagacttggaccggaacaaggaccaggaggtgaacttccaggagtatgtcaccttcctgggggccttggctttgatctacaatgaagccctcaagggctgaaaataaatagggaagatggagacaccctctgggggtcctctctgagtca

SEQ ID NO: 380 - DNA, 296 bp, Homo sapiens
  misc_feature (1)...(296): n = A,T,C or G
acctggacagggccagctgctgggggagcggcactggggactggaggctggaagcgggtggtgtgtgtcccctgtttacttttagctgagctggggttgggtgtacgggttctgttcctctgagccctgcggcccacctgatgtttacgtgtgtgtgtgagggggggcnnnnnnnnnnnnnnnnnnnnnnngtnatangcttaacanatgnanagncnactnactnctgattntttatncatttgtgcattnnaactatgcttttncgatcttnctgntgnnatnacnggcatgat

SEQ ID NO: 381 - DNA, 300 bp, Homo sapiens
cagaaaagagtatagtagggatgaccaaggtcaaagtgggtaaagaagactcatcatccactgagtttgtagaaaaacggagagcagctcttgaaaggtatcttcaaagaacagtaaaacatccaactttactacaggatcctgatttaaggcagttcttggaaagttcagagctgcctagagcagttaatacacaggctctgagtggagcaggaatattgaggatggtgaacaaggctgccgacgctgtcaacaaaatgacaatcaagatgaatgaatcggatgcatggtttgaagaaa

SEQ ID NO: 382 - DNA, 300 bp, Homo sapiens
gccaccggtctcttcctaatctgcacagactattttgggtatttctgggcgggcagttcctttgcatgtttcgggagaggtttgctgatttggggcttatatgtcaggcctttggtttgcgtcttattttaggggttgtttgggggcctgggtggtcggcctcacatgggaaggggatgggtagtggatggggtttctgttgtatcttgtgggcgggtgattttgcttttgtttttgtttcacattcttccccctccacaagccaaagtcgtttcatttggtttccactgtgtggactgt

SEQ ID NO: 383 - DNA, 273 bp, Homo sapiens
  misc_feature (1)...(273): n = A,T,C or G
gagatttgatattcgagtgctgggcttaggtctgttgataaatctagtggagtatagtgctcggaatcggcactgtcttgtcaacatggaaacatcgtgctcttttgattcttccatctgtagtggagaaggggatgatagtttaaggataggtggnnnnnnnnnnnngccngcnttnacttnatngcnnctttttcttgatcnacgncngnnatncnnannngtntatantaatncngaananttntttgnnntgctttatcaantnttcnt

SEQ ID NO: 384 - DNA, 259 bp, Homo sapiens
aagagaaggacctagagattgagaggcttaagacgaagcaaaaagaactggaggccaagatgttggcccagaaggctgaggaaaaggagaaccattgtcccacaatgctccggcccctttcacatcgcacagtcacaggggcaaagcccctgaaaaaggctgtggtgatgcccctacagctaattcaggagcaggcagcatccccaaatgccgagatccacatcctgaagaataaaggcccgaagagaaagctggagtc

SEQ ID NO: 385 - DNA, 296 bp, Homo sapiens
  misc_feature (1)...(296): n = A,T,C or G
agagcctgcaagtgacaaaggaagtgaggcagaggcccacatgcccccaccgttcacaccctacgtgcctcggattctgaacggcttggcctcggagaggacagcactgtctccgcagcagcagcagcagcagacctatggtgccatccacaacatcagcgggactatccctggacagtgcttggcgcatagcgccacgggcagtgtggcttgctgccccccaggaggcctgaggctgggtctcactgctctgaaaaagacccnnccaaaatgggccttggggctnnaggcccttg

SEQ ID NO: 386 - DNA, 300 bp, Homo sapiens
gaagaggaggctgtgtatgaggaacctccagagcaggagaccttctacgagcagcccccactggtgcagcagcaaggtgctggctctgagcacattgaccaccacattcagggccaggggctcagtgggcaagggctctgtgcccgtgccctgtacgactaccaggcagccgacgacacagagatctcctttgaccccgagaacctcatcacgggcatcgaggtgatcgacgaaggctggtggcgtggctatgggccggatggccattttggcatgttccctgccaactacgtggagctc

SEQ ID NO: 387 - DNA, 300 bp, Homo sapiens
ccgcagagggcctggaagaggtgctcaccacgccagagactgtgctcacaggccacacggagaagatctgctccctgcgcttccacccactggcagccaatgtgctggcctcgtcctcctatgacctcactgttcgcatctgggaccttcaggctggagctgatcggctgaagctgcagggccaccaagaccagatcttcagcctggcctggagtcctgatgggcagcagctggccactgtctgcaaggatgggcgtgtgcgggtctacaggccccggagtggccctgagcccctgcagg

SEQ ID NO: 388 - DNA, 300 bp, Homo sapiens
tggaggtctcctttcgccccagcccaggtggccaagcccatcctggcctcagaacatgctgagcacattttgtagggtggcacctttttatccaagttactagctacacatcagtgtttaaagagaaaaaagtgacctttcatttttttttcttgaaacttgaggaaacaagatacatactactgattttttttttcttaaaactaaatgcatgactgcagagcggtagaggtgtatatttttcatactgtggggcaaagtatttgtgctgctttttggagatggactggaacgtctggt

SEQ ID NO: 389 - DNA, 293 bp, Homo sapiens
  misc_feature (1)...(293): n = A,T,C or G
gtcaagctggccctggatgtggagatcgccacctaccgcaagctgctggagggcgaggagtgcaggctgaatggcgaaggcgttggacaagtcaacatctctgtagtgcagtccaccgtctccagtggctatggcggtgccagcggtgtcggcannnnnnnnnnnnnnnnnnnatgaancagntactcctatggnnttagcnttntanctatnacctgcncnaactannctnangtgctagnncttgccccaacccctacttttgtatttatattgtgtgtgcgtgtgtgcgt

SEQ ID NO: 390 - DNA, 300 bp, Homo sapiens
  misc_feature (1)...(300): n = A,T,C or G
ctcacacctgctttggatgcttcaagcacctcagccctctgaactacaaaacagangagcctgcaagtgacaaaggaagtgaggcagaggcccacatgcccccaccgttcacaccctacgtgcctcggattctgaacggcttggcctcggagaggacagcactgtctccgcagcagcagcagcagcagacctatggtgccatccacaacatcagcgggactatccctggacagtgcttggcgcagagcgccacgggcagtgtggctgctgccccccaggaggcctgaggctgggtctcac

SEQ ID NO: 391 - DNA, 257 bp, Homo sapiens
acccgtccggggccggccaatttgcatatttggaatgcgccgctataaacccggctggggttttgcagcgatttcttagatgtaaaaatgagatctcaatagcagcgggctgggcacatcctctcctctctccttctctctctgcccggagctggtttccgtctctcggctcggggctggaactccggcccaacctaggcgcgcagccgccacgagatggcgcacttccgatcaatgtcaaagccgccggggagccc

SEQ ID NO: 392 - DNA, 300 bp, Homo sapiens
gcgcgagcgtcggctccgcctgggcccttgcggtgcgctgcgggcaggcggtgaggctcacgcatgtgcttacgggcaagaacctgcacacgcaccacttcccgtcgccgctgtccaacaaccaggaggtgagtgcctttggggaagacggcgagggcgacgacctggacctatggacagtgcgctgctctggacagcactgggagcgtgaggctgctgtgcgcttccagcatgtgggcacctctgtgttcctgtcagtcacgggtgagcagtatggaagccccatccgtgggcagcatg

SEQ ID NO: 393 - DNA, 300 bp, Homo sapiens; identical to SEQ ID NO: 392

SEQ ID NO: 394 - DNA, 300 bp, Homo sapiens
  misc_feature (1)...(300): n = A,T,C or G
gtccatacatggagctccctggagcccgtgtgctctcgtgtgactgaacgttttgtgatgaaaggaggagaggctgtctgcctttatgaggagccagtgtctgaattgctgaggagatgtgggaattgcacacgggaaagctgtgtggtttccttttacctttcagctgaccatgaactcctgagcccgaccaactaccacttcctgtcctcaccgaaggaggccgtggggctctgcaaggcgcagatcactgccatcatctctcacnaggngaccatattggtttttgacctggagacc

SEQ ID NO: 395 - DNA, 300 bp, Homo sapiens
gcaaaatcaatgtggactgaacataaatcacctgatggaaggacttactactacaacactgaaaccaaacagtctacctgggagaaaccagatgatcttaaaacacctgctgagcaactcttatctaaatgcccctggaaggaatacaaatcagattctggaaagccttactattataattctcaaacaaaagaatctcgctgggccaaacctaaagaacttgaggatcttgaagcaatgatcaaagctgaagaaagcagtaagcaagaagagtgcaccacaacatcaacagccccagtc

SEQ ID NO: 396 - DNA, 300 bp, Homo sapiens
  misc_feature (1)...(300): n = A,T,C or G
aagagcacaagaggaagagagagaccctcactgctggggagtccctgccacactcagtcccccaccacactgaatctcccctcctcacagttgccatgtagaccccttgaagaggggaggggcctagggagccgcaccttgtcatgtaccatcaataaagtaccctgtgctcaaccaaaaaaaaaaaaaaaaaaacnnnnnnnnnnnnnnnntntngggngnctnntnncnnaaanccanncttnataaaanccttngntnatttggaacaacccncanntaaanngcagggaaaaaaag

SEQ ID NO: 397 - DNA, 300 bp, Homo sapiens
gataaatacctcagcccctcgccttcctcaacccacctggcaagtcttcttaggatctgatcccagttttctggaagcaatcctaccccagcccaagcttcccagagtcgagccttaatccttctcacttctcagtgtcagagcagaaatgaatcctggggttgactgtgtccattcgggttattagcagctaagaagcccagacgagtagtgtgagctgccttgggagcctcagtgagggcactgggactggcctcactctcttgcccccagcctagtgggctttctcctctgtctctc

SEQ ID NO: 398 - DNA, 300 bp, Homo sapiens
ctgaaccctaaaggaaagccagcaaaccagctgcttgctctcaggactttttgcaattgttttgttggccaggcaggacaaaaactcatgatgtcccagagggaatcactgatgtcccatgcaatagaactgaaatcagggagcaataagaacattcacattgctctggctacattggccctgaactattctgtttgttttcataaagaccataacattgaagggaaagcccaatgtttgtcactaattagcacaatcttggaagtagtacaagacctagaagccacttttagacttctt

SEQ ID NO: 399 - DNA, 300 bp, Homo sapiens
gctgacctacagcagaagctgctggatgcagaaagtgaagacagaccaaaacaacgctgggagaatattgccaccattctggaagccaagtgtgccctgaaatatttgattggagagctggtctcctccaaaatacaggtcagcaaacttgaaagcagcctgaaacagagcaagaccagctgtgctgacatgcataagatgctgtttgaggaacgaaatcattttgccgagatagagacagagttacaagctgagctggtcacaatggagcaacagcaccaagagaaggtgctgtacctt

SEQ ID NO: 400 - DNA, 300 bp, Homo sapiens
ggctagcgatttctacctgcgctactacgtagggcacaagggcaagtttgggcaccgagtttctggagttcgaatttcggccggacggaaagcttagatatgccaacaacagcaattacaaaaatgatgtgatgatcagaaaagaggcttatgtgcacaagagtgtaatggaagaactgaagagaattattgatgacagtgaaattacaaaagaagatgatgctttgtggcctccccctgatagggttggccgacaggagcttgaaattgtaattggagatgagcacatatcttttacca

SEQ ID NO: 401 - DNA, 300 bp, Homo sapiens
acccccttcatggacagatcccccacagcctggggcagaagaggcgtcgagggcgccagaagtggcggcagcagcagccgcagcagccaaagagaggcaagagaaagagaaagcgggcggtggaggggtcccggaagagctggtccccgtggttgagctggtccccgtggttgaattggaagaggccatagccccaggctcagaggcccagggcgctgggtctggtggggacgcgggggtgcccccaatggtgcagctgcagcagtcaccactagggggtgatggagaggaagggggcca

SEQ ID NO: 402 - DNA, 300 bp, Homo sapiens
ggatcctttccagacagaagaccccttcaaatctgacccatttaaaggagctgaccccttcaaaggcgacccgttccagaatgacccctttgcagaacagcagacaacttcaacagatccatttggaggggaccctttcaaagaaagtgacccattccgtggctctgccactgacgacttcttcaagaaacagacaaagaatgacccatttacctcggatccattcacgaaaaacccttccttaccttcgaagctcgacccctttgaatccagtgatcccttttcatcctccagtgtctc

SEQ ID NO: 403 - DNA, 300 bp, Homo sapiens
aattccgttgctgtcggacagattgccctagtacccacccacctatcagggttatgcaatggaacatcctcgcccaagctcttggagaaggcaaagacaactttgtacagtgccctgttgaagcactcaaatgggaagaaaggaaatgtctcatcctggaagaaatcctggcctaccagcctgatatattgtgcctccaagaggtggaccactattttgacaccttccagccactcctcagtagactaggctatcaaggcacgtttttccccaaaccctggtcaccttgtctagatgtag

SEQ ID NO: 404 - DNA, 300 bp, Homo sapiens
agtgggataaaatgagacgagccctggaatataccatttacaatcaggaacttaacgagactcgtgccaaacttgatgagctttctgctaagcgagagactagtggagaaaaatccagacaattaagagatgctcagcaggatgcaagagataaaatggaggatatcgaacgccaagttagagaattgaaaacaaaaatttcagctatgaaagaagaaaaagaacagcttagtgctgaaagataagagcagattaagcagaggactaagttggagcttaaagccaaggatttacaagatg

SEQ ID NO: 405 - DNA, 856 bp, Homo sapiens
  misc_feature (1)...(856): n = A,T,C or G
tggtgccngttcctattccgtgctntcgtnctncnccaggancnangcgtntcgaattcggcacgaggaaggaggacctaggcacacacatatggtggccacacccaggagggtagtggggagttagatttcagagtccaggccctaggttgggacccactccaaataatctcctcggtgtgggtggtggttctatagagggataaatgaataataaacattgttaaaatatacgaaaaaaaaaaaaaaaaaaaaaaaaaaaaaaaaaanaaaaaaaanaaaaaaaaaaaanaanaaaaaaaaananaaaaatnaaaaanannanaaaaaaaaaaaaaaaaanncccctncnccctaaaanattcnggggggntttttcctccannccnnntntttaatannctncttnttgnntcttngnctcaccnnttcttttggtnggcnntaananaaaatnttnnttttttttnggntanaaatncnntnncngttttttntnnttttttttcnaaaccctcctnttntanctcncgtntcnaaaaanntntttntccncnncnnttnnntnntnctntttctatttttnnttcttntncaannttccnangtgnnnngngtntnntgnggcttgtttntttttncnncctngcgtcatccnnccaataatttcttnncnccccnannccnnattttttntnncctctatntnngnngngnnatatnantcccctttattnttnatnantagtcntntnttttnttntccntngtnatannattttntntcccnntntaanttcctcannnnatttnntnnncnncgngntatatttnangntanntcnncggggttnct

SEQ ID NO: 406 - DNA, 843 bp, Homo sapiens
  misc_feature (1)...(843): n = A,T,C or G
tnntnnnnncgnangctggnnnnttctncccntttctaatngttnctaatactanggatngtcacgaggntcccangtaggcatagcgcactgctgtacgtttttggttgtttttaagaaactcgatgaagaggggtgtcattctgggctcggggtggttgccaatttttcaccagaaagggagccaccccttgcaaccacttctgtctccgttagccccccctctgccctcctccaagccaaagcgtggcctggcttttgtcttcccatttagttttcctcttttacccttccttttgtgcttaatttattaaaatagttgctgtataatttattttcataaactataaaaaaatactaaatggttaaaatagacttgcaggccaatcttaaatggggtgggaggggtctgagggtgggatggggaaagggaaagaggttttgatntaaacaaaacaaatgcactttgggtgtgtnnnggnattttnctggggatananggggtgggggnnnnngnannnnnnnnnnnnnnnnnnnnnnnnnnnnnnnnnnnnnnnnnnnnnnnnnnnnnnnnnnnnnnnnnnnnnnnnnnnnnnnnnnnnnnnnnnnnnnnnnnnnnnnnnnnnnnnnnnnnnnnnnnnnnnnnnnnnnnnnnnnnnnnnnnnnnnnnnnnnnnnnnnnnnnnnnnnnnnnnnnnnnnnnnnnnnnnnnnnnnnnnnnnnnnnnnnnnnnnnnnnnnnnnnnnnnnnnnnnnnnnnnnnnnnnnnnnnnnnnnnnnnnnnnnnnnnnnnnnnnnnnnnnnnnnnnnnnnnnnnnnnnnnnnnnnnnnnnnnnnnnnnnncn

SEQ ID NO: 407 - DNA, 743 bp, Homo sapiens
  misc_feature (1)...(743): n = A,T,C or G
tgggcnggnnctantngngggctctcgacttcntacgancttccaatggttnggnggcacgagcccccatcttcactggttattccacttatttaaaatgtccagaataagcaaatctccatatagaggaagtagattagtggttgcttcgggatgggaggaatgggaagattgaggtctttcttttgcagtgataaaaatgtcctaaaattgactgtagcgatggtcacacaactctgaatatgcttaagaccattgaattacacactttacgttggtgaattgtatggtatgtaaattatagttcaataacatagttacaaaagataatcaaaagcatgaaagcactgttgatgtggtttggatctgtgtcctcaccgagtctcatgttgaaatgtaagccccctggtgggaggcgatgggattatggggcagagtcctcacaaacggtttacaccacccgctcagtgctggtctcctgatattgagtcctcatcacatctggttgcttcaaagtgtgtggtgcctcccctctatctccctnctgctctggccatataagatgtgcctgcttctcttcgccttctaacatgattgnaagtttcctgaggcctncctagaacaaaactgctgtgctttctgnncccatctacaggacccggagccaattnaaccccttttctttataaaaaaaaannnnnnnnnnnnnnnnnnnnnnnnnnnnnnnnnnnnnnnnnnnnnnt

SEQ ID NO: 408 - DNA, 746 bp, Homo sapiens
  misc_feature (1)...(746): n = A,T,C or G
tgtccgnttcttangntgngctctngcttcctaggagtntcnaatcgcttggtgcagacctccagcacaagcctctgctagtngatctcacggtagaagaaggtcaaagattaaaggtnatttttggttcacacactggtttccatgtaatngatgttgattcaggaaactcttatgatatctacataccatctcatattcagggcaatatcactcctcatgctattgtcatcttgcctaaaacagatggaatggaaatgcttgtttgctatgaggatgagggggtgtatgtaaacacctatggccggataactaaggatgtggtgctccaatggggagaaatgcccacgtctgtggcctacattcattccaatcagataatggctggggcgagaaagctattgagatccggcagtggaacaggacatttggatggagtattnatgcataagcgagctcaaaggttaaagtttctatgtgaaagaaatgataaggnattttttgcattccgtgcgatctggaggaagtagcccaagtgtttttcatgaccctcaacagaaattccatgatgaacctggtaaccagaagaaccccttggcacttatcttcatggcgttattctaatttaaaaagaacataactcatgnggacttatgcccagtctagaggcagaatcagaaggcttgggtggaacatatcgntttcctttttcctttccttcggccctnccagnccagtccatnttt

SEQ ID NO: 409 - DNA, 761 bp, Homo sapiens
  misc_feature (1)...(761): n = A,T,C or G
ggatccggtttccaatgctcgggcnctcgagctncctaagannttgctaatgcttggnggngtgcctcgtgtgcgtggattcgtgtgtgtgtgtgtgtctngtatatgtgtgcgcagagtgcatcattttcagactctactatttccgtcaagtttctgtttgatttggatcatctcaggatcggattctgttttagagtgtttctgggccaggatccgggcccctgccctcctctgcacctgaccacactccctactcagggctagtctgttcttcccggacatcttctggtagccgtgcaggagagggctgggtggggcagagccaggaggggacctggtgtgtcacctgcccaccacctggctcatccctcangcccaccctgaccctacattacataggttacgtcagcctactgtggctgttgagcaaagcatttctcctttctngggcctcattgcactagatgggcctgtggtcccaaagtaggtcagtaggttggggttgctgacaccccttgggtgcaactttgggacaagatgaantggctctgtcctgtcactggcctctccttgcctgggggctatgtgcacttcaaaaccctggccaagctcaagcccatgaagnattggagaacaccctgggcccccaagaactggangcacccggccanttcccctgggattccanctttgccanggtgaacccttcttttacccnaaacttntgtccccctgnttccacttccaaaaanaactgg

SEQ ID NO: 410 - DNA, 748 bp, Homo sapiens
  misc_feature (1)...(748): n = A,T,C or G
gatgccggttcctatgatgngctctcggcttcctaggagttccaanactnggctngcncgaggncttntaaatatatctnggntttantaggtgataagtnctgtcanttagtancatctgaaaaancagctttgtcctgggtgaaaaaggatgccaaaattgcctggaaaagagcagtganaggagtccgggagatgtgtgatgcntgtgaagcancattgtttancattcactgggtctgccaaaaatgtggatttgtggtctgcttagattgttncaaggcaaaggaaaggaagagttctagagataaagaactatatgcttggatgaagtgtgtgaagggacagcctcatgatcacaaacntttaatgccaacccaaattatacctggttctgttttgacagatcttctagatgccatgcacactcttagggaaaaatatggtattaaatcccattgncattgtctaacaaacagaatttacaagttggaaattttcctncatgaatggtgtatctcaagtttacagaatgtcttaatcacagtataaaattctctgngcatgcctgagtctcagcgccaaaatcctcctccgaagtctgagaaaaatggtggcagcnnccccanaaagtgatgttnggcnccagattaccaggttaacttcctccagaatnccagtcaccactgnactggntagcanatcttgccgagccaaaaagcccnaagngggaaaaaaaaaaaaaaaa

SEQ ID NO: 411 - DNA, 773 bp, Homo sapiens
  misc_feature (1)...(773): n = A,T,C or G
gnangnnngnttcntagtgcccgtgggagtcttagatnccctaaaaaattgntaatgctnggtcggcacgagtcaaggcctacgaaacaggtgatgcactaccccggctacggttcccccatgcctggcagctnggccatgggcccggtcacgaacaaaacgggcctggacgcctcgcccntggccgcagatacctcctactaccagggggtgtactcccggcccattatgaactcctcttaagaagacgacggcttcaggcccggctaactttggcaccccggatcgaggacaagtgagagagcaagtgggggtcgagactttggggagacggtgttgcagagacgcaagggagaagaaatccataacacccccaccccaacacccccaagacagcaatcttcttcacccgcttgcaacccgttccgtcccaaacagagggccacacagataccccacgttctatataaggaggaaaccgggaaaagaatataaagttaaaaaaaaagcctccggtttccactactgngtagacttcctgcttcttcaacacctgcagattctgatttttttgttgttggttgttctctccattgctgntggtgcanggaagtcttacttaaaaaaaaaaaaattttgngagtgactcggtgtaaaaccatgttanttttaacagaaccnanaagggttgncctattggttaaaaaaaaaaaaaaaaaaaaacttngngcctttagaactattanngagnccnatttacnttaatccannct

SEQ ID NO: 412 - DNA, 774 bp, Homo sapiens
  misc_feature (1)...(774): n = A,T,C or G
gnannccggattcntagcgntcgtggaagtgcatcggctgntaacaatttgctaatgcttggagttccaattccagagaaaatgagtgaatgggcacctcgacctcccccagaaatttgtccgagatgtcatgggttcaagtgctggggccggcagtggagagttccacgtgtacagacatctgcgccggagagaatatcagcgacaggactacatggatgccatggctgagaagcaaaaattggatgcagagtttcagaaaagactggaaaagaataaaattgctgcagaggagcagaccgcaaagcgccggaagaagcgccagaagttaaaagagaagaaattactggcaaagaagatgaaacttgaacagaagaaacaagaaggacccggtcagcccaaggagcaggggtccagcagctctgcggaggcatctggaacagaggaggaggaggaagtgcccagtttcaccatggggcgatgacaatgtttgccacagcctctgcctggaacctggctcgtgctgtgaccagaagggaaaggcggctgtttggctctttcttccccgcaaggaccccgcttacccgctggatggagagcaaaggagacccccttccgagcccgntcacagtcctgtatttggcaaggtttgggaacctgaaggggccaatntnccttgacacttanangcacttgcctttcagacaccattccgngcntctggtaaaaggggacaagaaaagccttaaccttggcnncatattttgacagggg

SEQ ID NO: 413 - DNA, 773 bp, Homo sapiens
  misc_feature (1)...(773): n = A,T,C or G
gnngnnnnnntttctaatgcttgggnnnnnngtcnatgcntaagagccangcggntcgaattcggcacgaggcgggcccggccagcggaagcccctgcgcccgcgccatgtcaaagaaaaaaaggactgagtgcagaagaaaagagaactcgcntgatggaaatattttctgaaacaaaagatgtatttcanttaaaagacttggagaagattgctcccaaagagaaaggctttactgctatgtcagtaaaagaagtccttcaaagcttagttgatgatggtatggttgactgtgagaggatcggaacttctaattattattgggcttttccaagtaaagctcttcatgcaaggaaacataagttggaggttctggaatctcagttgtctgagggaagtcaaaagcatgcaagcctacagaaaagcattgagaaagctaaaattggccgatgttgaaacggaagagcgaccaggcttagcaaaagactttcttcacttcgagaccaaangggaacagctaaaggcagaagtagaaaaaatncaaagactgtgatcccgcaagttgtnggaagaaatcgccaagcaaatnaagtagcccaaggaactgcttacagatggactgattacatattcgcaataaaatcttnggcccaaagaaaaatttngggtttgaaggaaaattaaattggttngaaccttttggaatttcccgaaagacttttgcctncntngacttaaaatatttccatggnggtgaaaggttgtccaanctt

SEQ ID NO: 414 - DNA, 755 bp, Homo sapiens
  misc_feature (1)...(755): n = A,T,C or G
gnagnnnnnnnttctaatgcttggggnnnnnngtcaatncctnngancnaggcggntcgctcatccagaaangtcagatcancaaagaagtccangaaaaantgcgacccagctngaccntttgatcccaggcttagcacacgattgcatggcntcccctttagccacttnaaccactgcagacntccaggaagctggactctctcctcagtccntccagacttctggccaccacagantgaaaaccccattttcaactgagctatctttgctccagcctgatactccagactgtgctggagatagtcataccccactggctttttccttcaccgaggacttggaaagttcttgtttgctagaccgaaaggaagaaaaaggggattctgccaggaaatgggaatggcttcatgagtctaagaagactatcagagtatggagaaacacaccaaactacctggggacaaatgctgtcagcccttaggcaagactaaattggaaagaaaggtgtctgccaaagaaaacaggcaggcccctgtcctccttcaaacatacagggaatcctggaatggagaaaacatagaatcagtgaaacaaacccgtagtccagttctgngttttcctgggatatgaaaagaatgaccanggactnctggagtcaacttttcacttgaagaatctcaaggccaccggtcattggccacacactngaactcctttttaagatgtacccattactggaattgggcttaggg

SEQ ID NO: 415 - DNA, 852 bp, Homo sapiens
  misc_feature (1)...(852): n = A,T,C or G
gnagnaannnttctaatgcttgggnnnnnnngtcaaaccttannaacctggcntgncgaattcggcacgaggtcacaggcaggtttantggccagtttaaaacttatgctntctgcggggccnttcgtaggatggtgagtgtttccctgggctttgctcatcacttcgggacatcgtggactttaccgtgcgcnttggagtgtgtgatggtgcctgagtagatctgctggcagagtagtttgagccagctggactgggctggccgcctgccgcttcttgagggtggaagaggggtgctctgagaagacactcaggcagcagactctgcctctcactaggaggtgcccccccgaccccgttccaccatagtcaaggctgcaggctgccccgggagaagtggctccccttcttgcgcctgtcttccattcgcttcaccgggggganaagacnttgggcttggttggcacagcntgacccttctgcccatcttnaaggcagncccggaantgggaaaaatatttctttaaatggtggcctttnntttttttttnctttnaaaggggttgaagttccannaatgnatttcccaatttccttcccgaattgggncccaaagggccccaatggggcantcggtcctttaaaaagnaacctttttggacctgggaagaagaaaatcacccagattgttgggaaatattttggncattaaaataaantaatggaaaacctnaaaaaaaaaaaaaaaaaaaaactcgagcccnttaaaaacttttagtgagtcnnattaccnttanatccanacnttgatangaanctttggataattttgggncaaaccnnaacttngat

SEQ ID NO: 416 - DNA, 754 bp, Homo sapiens
  misc_feature (1)...(754): n = A,T,C or G
ggnnnnnnngtnaaaccttccnaannaggctnggcgtcactgnccccggtcaacaaacccacttttatgacagttttcttccgcagcttggctnttaaattttactggcaggtgtatggttgttggagggttcctagtgagttgggggacctggcantanagctgcttggttggaggaagtgaanctggcttantaccagcagctgatctcttccacgtgctgctgctttttttgccactctgatactaaaccagagaaagctgcaggtggataaagaagctgtggctgttttttgcttttgggtggcaatgagaaagagtcacagtgtgggttaaagggatctgcagtggggccaaggatgccaccccaccctcagctgtangcaagcttgcacataaataacccccgtcagtggagtgttcgggatgcagggggcantatagtgttcttggactttgtccgtcctggggcagtttttaagttctttatatttaagtggggtcagtgccaagtgctaccactttcccaataaangaatgggggacccanaaggctggggtccctggctaccttgttatgaaggttttgntntttctctgacaaganttgctttggaaagancctgtttttaggggattattttttgnataccccgatgggganccagggttctnctcaaaacccttacaacccttaggatcatagggaaaaggggcccntnttttnctgctggcttncccaacttaaaaacnt

SEQ ID NO: 417 - DNA, 755 bp, Homo sapiens
  misc_feature (1)...(755): n = A,T,C or G
ngtntatagcttnctaatgcttcntancgaattcggancgagagaagccntgagcagcaaagtctntcgcgacaccctgtacgaggcggtgcgggaagtcctgcacggganccagcgcaagcgccgcaagttcctggaaacggtggagttgcagatcagcttgaagaactntgatccccanaaggacaagcgcttttcgggcaccgtcaggcttaagtccactccccgccctaagttctctgtgtgtgtcctgggggaccagcagcactgtgacgaggctaaggccgtggatatcccccacatggacatcgaggcgctgaaaaaactcaacaggaataaaaactggtcaagaagcttggccaagaagtatgatgcgtttttggcctcagagtcttttgatcaagcagattccacgaatcctcggcccaggtttaaataaggcaggaaagttccctttcctgtnacacacaacgaaacatggtggccaaagtggatgangtgaagtncacaatcaagttncaaatgaagaaggtgttatgtctggctgtancttgttggtcacgttgaagatgacnngacgatgaancttggggtataacattcacctggctgtcaacttcttggnggtcaattgcntcaaagaaaaaacttgggcagaaatgttccnggccttatnttntcaagaaccnccatggggcnaagccccaacgccctttntttaaaggcncatttggaattaaattcntntttncccg

SEQ ID NO: 418 - DNA, 757 bp, Homo sapiens
  misc_feature (1)...(757): n = A,T,C or G
tggggnntnnnttctaatgctgggatgttctaaangntgggctactcgttctttccgcaggancccntcgattcgaattcggcacgaggaaaggtggcgcgcttctcacggctgagttgctgcgcctgcagacggaagctccccacaggcagagctgcttggatgtgtgagtcatgaagccagagaagccccgctccatgagcagtgactccccaggccctgtgacctccctcctgtcttgcagctcctcctggcaccagtccccagggctctcctgttggtagttcctgcttttcttcttggaaattcctcgtggacctcgagatctttaccctaaaatagttctgttgaatttcaccctggcaatgtaaattgatagcttatcttcacagatgccagacaatggacaactcaccatcagtcctctgctcacctgagacaaatgcatgtctgattgcttcctctgccctattgnttatgtgaaaatgcagattcactgagccagactaaggcatcagtgactgttcctctactgcctctcacatggagattgtgtattcagtgaaaggctgatcaaagaccccaaaggaatgcaccagtttatctcttatctacctatgacctgcgagctgnccaccacccccagttgttgcgcctttccagacagaaccagtgtcatcttacacgtattaattggatgtcctgngncttccttaatatgtatcaaaacaagctngccttgaacaccttgggcacn

SEQ ID NO: 419 - DNA, 738 bp, Homo sapiens
  misc_feature (1)...(738): n = A,T,C or G
gnnngncgttcnaattncgnggnntctttctngccnannannannngcgtgngngaattcggcacgagactgttcatcctaagttccactataaacaggctcatgactcgggcacagacacttcttgcgtgactttttcctatgatggtaatgtccttgcctctcgtggaggtgacgattcattaaaattatgggacatccgacaatttaataaaccacttttttcagcctcgggtcttcccaccatgttcccaatgactgactgctgtttcagtccagatgataagctcatagtcactggtacatctattcaaagaggatgtggcagcggcaaacttgttttctttgagcgtaggactttccaaagggtgtatgaaatagacatcacagatgcgagtgttgttcgctgcctgtggcatccaaagctgaaccagatcatggttggaactggaaatggattggctaaagtctattacgaccccaacaagagtcagaggggagcaaaattatgtgtggttaaaacccancggaaggcaaaacaagctgagactctactcaggactacatcatcacccctcatgccttgcctatgttcccgtgagccccgncaacggagtacaaaggaaacagctggagaaggacagactggatccctgaagtcgcattaacctgaacctcctgtancangcccangtcgtggtggccgatttggaacccacgggggcactnttttttcct

SEQ ID NO: 420 - DNA, 739 bp, Homo sapiens
  misc_feature (1)...(739): n = A,T,C or G
gcgntnntattagcgtgggctcgntctcgctcnacncancnngngctggncgaattcggtacgagaatcagaggaggcttcttcatccttcaactccatgatgaactcctatatgaagtggcagaagaagatgttgttcaggtagctcagattgtcaagaatgaaatggaaagtgctgtaaaactgtctgtgaaattgaaagtgaaagtgaaaataggcgccagctggggagagctaaaggactttgatgtgtaactgtgctgttgatgaagtcctcccagggaagcctgtgcagatgcagtcacctggaaagaacagagattccctttcacctacctcagcaaaacaaactttcaagtcttgatagacttagcctagtaattttatagtgagagtttcaaactatatatcaagtgtctatagcatcaaaaacttctgggggcgtgggggaaagtagaataccaagtataatagttacattcactttcaaagagcatctatgaatttgccttttgtaacttactgtggctttaaacatattcagaacagatgcttgaaatatgcacttagcactttggttccacatctgtctgggtaaaccatgaagaaaatgaagctgctgcctcaatcgancccagacagcagccataggcagataaagatttnggttcacccttggtggtgggaggcatcgtgtgtgcctttttttcctctaatatcaattttacagtccgggaan

SEQ ID NO: 421 - DNA, 727 bp, Homo sapiens
  misc_feature (1)...(727): n = A,T,C or G
gtgatctttntgagtgggggccntnctngctctannanataggttnggngggctagcgatttctacctgcgctactacgtagggcacaagggcaagtttgggcacgagtttctggagttcgaatttcggcccggacggaaagcttagatatgccaacaacagcaattacaaaaatgatgtgatgatcagaaaagagcttatgtgcacaagagtgtaatggaagaactgaagagaattattgatgacagtgaaattacaaaagaagatgatgctttgtggcctcccctgatagggttggccgacaggagcttgaaattgtaattggagatgagcacatatcttttaccacatcaaaaataggttctcttattgatgtaaatcaagtcaaaggatcctgaaggccttcgagtattttactatttggtacaagacttgaaatgtttagttttcagtcttattggattacacttcaagattaaaccaatttaaattgtatgttttcaagctggttgnatatttaattaaagggatgggaaggggttatttgtcatttacagtattggggttttatgaatgtgaagcaaccaaaaaaaattnnaatgtaaaactggaaaataggaaaattcattancagcttaatgggtatccttacttgatncnctgggtttggaagtccccacacacattaaatctgtaatgaaancncttttggttaaaatttctctat

SEQ ID NO: 422 - DNA, 753 bp, Homo sapiens
  misc_feature (1)...(753): n = A,T,C or G
gtntngnnngnngttnnattatatggntcgnctnnctcnannancnangcttgngctgacaacttgattgggttctccttcaggtttgaagcgccctcnagaagtgtctaaaggagacagttgatagccaaacaacagttttggattcactgactgattatgaaagaagcagtagactggtatcaagaatcagtcagcaaggaggccctcaccagacgccagtgccatgttcttggacttctcagcctccatattcatgaactaagtttttggaatccttaggcttccacgtgtggaaagcctgagctaacctactggaggatgagccatcacctggagcagattcaggccatcctagttgaagcctccctaggccaagcaaccgtccaactaccagacattgaccattcagccttgaacattcagcacaaagacaaaacagaccagaccagaagagtcccacagaataggggaaactattcagagaaaacttaagccactaagttttatggtgttttgttcttgtagccagaagcataggcatactggccaatacaaaccgaaatccttctaacgtantggacccttttcaggccagcattttttcccttgaaaacctgggagccttgtattccatcttattagcagaagatcactttcaccaatggtttgggctcttgatttggaattgatgatgtaatgagcctntattcnanatgngacttaatacctctgcgaattgactggattccn

SEQ ID NO: 423 - DNA, 844 bp, Homo sapiens
  misc_feature (1)...(844): n = A,T,C or G
nggnnnttnnnnnnnatnccntgatcgtgtntcgttctttctncaggatnnnntcgtttcgaattcggcacgaggaaaagggagccgcgcagngcctacgggagtncggcggcagcagccggtaccggcaaccacgggcagctctcagggaatctccgtcgttgaggccanaggctccagtccccgcgagtccagatgcctgtccagcctccaagcaaagacacagaagagatggaagcagagggtgattctgctgctgagatgaatggggaggaggaagagagtgaggaggagcggancggcagccagacagagtcagaagaggagagctccgagatggatgatgaggactatgagcgacgccgcancnagtgtttcagtnagatgctggacctggagaagcagttctcggaagctaaanggagaagttgttcaagggaacgacttgantcanctgccggnttgcggcttggaaggaaantgggggggcttgaanaagaagcccctggaatnccaccggaagcccccttttgggggggggccttgcaaaccgggaanccctttnaaaggaatttcngccantttcaanggttgggccaaggggaatcntaccnaaggggccttctnggccttggnatggtgaatccanggnaaattaaggtncccaattgntgaanccttccaangggaancccaaaccagcacccttgnaanaagttgagaaaacttgcttgcntcttntgacacccctncnagggggaacttcaaggaaccggttcctnaggcttggaaggaggacccccananccctggancctaaattnttaaatgggtnggaccaccn

SEQ ID NO: 424 - DNA, 799 bp, Homo sapiens
  misc_feature (1)...(799): n = A,T,C or G
ggagnnnngnntccnaattnnntgggnnnnnnngtcaaannctngctactcgttctttccgcaggatcccatgcgattcgaattcggcacgagcccagacctatggagtcagacagtaggtttgaggcccagcaatctatggtttaacaagccatccaggtgtttctgatgcacagtgaaattggggtaccactggtattaggtttggtatggcaactttttcatcacttgttttatgtagttgtctgatcaattgtgaaaacataatgaatgttggaaatggaacagtaaaataacgaaagccaacttttttttttttttttgagacggagtcttgctctgtcgcccaggctggagtgcagtggcgcgatctcggctcactgcaagctccgcctcctgggttcacgccattctcctgcctcagcctcccgagtagctgggactacaggcgcccgncaccacgcccggctaattttttgnatttttagtagagacggggtttcaccgtgttagccaggatggtctcgatctcctgacctcgtgatccacccgcctngggcttccaaagtgctgggattacaggcgtgagccaccgggcccgggccaaaagccaactctttatgcctagaaaatattgtgcaccctatgacccaagcccattgaatttttncngggaaatttatggtaaattattgaaatggatggtacctttaaaaagttatttggcacattccccttgggttacctttggnatggtttgccagggaattnaaaactttgggntnaaaccttttttann

SEQ ID NO: 425 - DNA, 750 bp, Homo sapiens
  misc_feature (1)...(750): n = A,T,C or G
gangccggattccaattntcnggctnctctnaaannctgtntaatgcttggtccgcangancccatgcgattcgtggaggtctcctttcgccccagcccaggtggccaagcccatcctggcctcagaacatgctgagcacattttgtagggtggcacctttttatccaagttactagctacacatcagtgtttaaagagaaaaaagtgacctttcatttttttttcttgaaacttgaggaaacaagatacatactactgattttttttttcttaaaactaaatgcatgactgcagagcggtagaggtgtatatttttcatactgtggggcaaagtatttgtgctgctttttggagatggactggaacgtctggtttctgtccccgggcccggcagctacgtctattttctgtagaaggtgccacagtgagacctggagccaccccttcctgcctggcgccgtttanagctgggagcccgtggactccggcctgtttctaccttctattcaaccactctgacgtggggagacaagaagaaatagaactttttgatagtgtggtaaaaacattggattttgaactattttagtaaaaggagttaccaacaagaatgtnataggtgctactttgagctagataaataaaggctctttgtgagcctcctgaaaaaaaaaaanttnnnnnnnnnnatnannnnnnannaaaaaaactggncctttaaaactttangggncgtttacctanaccct

SEQ ID NO: 426 - DNA, 819 bp, Homo sapiens
  misc_feature (1)...(819): n = A,T,C or G
gnagnncggnttcttatgatcgtggctnctcntctannggttgtgtaatgctnggtcnncangannnnntgcganncgaattcggcacgaaggggggttcccaatagtagaaaagggtccccattcctgctcagcaccgcacctctctacccccccacagacacacatgcagacacacacatgcagacaacacgcagacacacacatgcaggcactcacatgcaggcccatgcacacacacgtgcacacacatgcagagacatgcagacacgcaggcacacatgcacacatgcaaagacacgcatgcaggcacacgcagacgcacacagagacacacatgcagatcacatgcacacacacatacacacactggcccctgtttttctgtggtgtcactgggtgccagcaactcggtatctnccaccttccactaaaacctgggccttaatttctctcccgtccccacccctaaattcctgatggatgaacctagagctgtcctgtccactccaggccggactgacgtancctatgggcccagcaggtccagggcccacgttttaatttctttttnaaaagctttaggtcttggccnggccgccggtggttcacgccttgggagttcccagcatttttngggaaggccnaaggccgggttggattcacaaaggtcaagcaagtttcaaggaaccaagccttgaaccaggccattgggtgaggaaccctgggcttnttactngggnaaattcccaaaaaaaaattggccttgggccnaagggtgggcaagggcacccttgttggggtccccaaantttacct

SEQ ID NO: 427 - DNA, 750 bp, Homo sapiens
  misc_feature (1)...(750): n = A,T,C or G
gagnnngattcnaattnctgggctnctctcttnntatntaatgctgggtccgcanganccnntgcgattcgaattcggcacgaggtccaaggacaacttcgagacatttctttttgccaccgtatctaacagggagcaggaagatctctgccgaggaattgtccagctctgcttcaatgagcaaagccaacagctgctagcagaggtccagccctctgactctttcctcatggtagagacaactgcatactttgaggcctacaggcacgtcctggaaggactccaggaggtccaggaggaagatgttcccttccagaggaatatcgtggagtgtaactctcatgtgaaggagccaaggtacttgctaatggggggcagatatgactttacccccttaatagagaatccttcagccactggggaatttctaagaaatgtcgagggtttgagacatcccagaattaatgtcttagatcctggccagtggccctcaaaagaagccctgaactggatgactccagatggaagccttgcagtttgctctcacaagggaactggctattattcaaggaccttctggaacaggcnaaacctatgtgggtctnaaaaattgttcaagcccttctaccaacgagtcttgtttggcaaaattaaccttcagaaattcccatcttggttgngtgtatactaatcatgctttggaccanttctggaangcttttccattgtcagaaaaccanatttggccgg

SEQ ID NO: 428 - DNA, 943 bp, Homo sapiens
  misc_feature (1)...(943): n = A,T,C or G
gnngnccggtttcctattctcnggcanctctcttcctncnacctattanctggactctaaanaaaagnntgnngcggttggctcaagggccaccanaacatttctttattattattattttttaacctgnacatgcnttaaagggtctattacctttctttccgtctgtctcaacagctgaaatggggccnccaaggagtgccttccttttgctccctcctactgggactgacggntggnantgtntgnncccanntgggggtgtctcctgnctgggaagganggaaagggaggcanagttttgccggggttgcanntngacancangctgnanagganatggctaataactgtttaatggaaacctgcttgggcttgganggaacttagnctgaattttcccgacttcctctgccagttattgacacantctctttntaagacangaaataaactaaaccccaccccaaggnantnatnncangcngaaaacnncncatngcccacattncctnatcccntancaccnnctcnttntttnncccaanactncttcccanntntcnccntttacccntanncntnnttntatcccnctaatncctnannnccntnnttntccnnatncttacncncncnnntnnnncccnnntctttnnncccaaanctnncctcncnnttcnnctnaaccntntnnncannanacacccttctnatnncccannntctncacnntnnntntctccnnntnnncnccnnnntcntnnnnanancntntnnnanancnatctnntncncnncnantnnnnttcanttcacnctctnnnnnntntanccnattnnccntcnntnnccnnttannncntnnnnnncnaantnnnnnnanctctncnnncnnctcanntnnnntnnnnnncnntcnanaccntnnnnntctatnccc

SEQ ID NO: 429 - DNA, 775 bp, Homo sapiens
  misc_feature (1)...(775): n = A,T,C or G
gnangnnnnnnntttctaantncttgggnnnnnngtcanngattnngctaaaggttnggatcncncgcagnaangctgtggcgctccattgtgaaagatccaggcatttttccgagccaggaaaagcccaagatgactacaggatattagtgcatgcaccccaccctcctctcagtgtggtacgcagatttgcccatctcttgaatcaaagccagcaagacttctctgctgctgtgatctgcacaccctccaacctgggcagggactggggggatgcagtgtgtgttagtgcccatgtggcattgtggcactgttgccccccatggcggcatgggcaagatgaccttccattagcttcaagtcttgttctcttgtctgtggtctgtttaatatgtgggtcactagggtatttattctttctcccatccttacactctggatcattgtgcagacttaatcagggttttaacgctttcattnnnnnnnnnntttttttgagctcaaagaaagttctcattttccctattcaactaatacccatgccgngttttttaccttggatttaaaggcaccttangttggggcaacagattctcactcatgtttaanacctggnattcancttcataagaccaaaganggagctttccctttctctttacccctnaggattctcatcctttacanntngactttttccaggccaatttcccatnnaatctgcnanncccngccttttgncccaagcttttntgntngnccccccatttacccn

SEQ ID NO: 430 - DNA, 763 bp, Homo sapiens
  misc_feature (1)...(763): n = A,T,C or G
ngggtgnnnnnntttctaatnctggggnncnntnnncnnnntttcctaatncttaggngctcgttctttctccangcagnnnngcgtttcgcgacagctctccaatactcaggttaatgctgaaaaatcatccaagacagttattgcaagagtttaatttttgaaaactggctactgctctgtgtttacagacgtgtgcagttgtaggcatgtagctacaggacatttttaagggcccaggatcgttttttcccagggcaagcagaagagaaaatgttgtatatgtcttttacccggcacattccccttgcctaaatacaagggctggagtctgcacgggacctattagagtattttccacaatgatgatgatttcagcagggatgacgtcatcatcacattcagggctattttttcccccacaaacccaagggcaggggccactcttagctaaatccctccccgtgactgcaatagaaccctctggggagctcangaaggggtgtgctgagttctataatataagctgccatatattttgtagacaagtatggctcctccgtatctcctcttcctaggagaggagtgtgaacaaggagcttagataagacaccccttaaacccattcccttttccaggagacctacccttcacaggcacaggtccccaaatgagaagtctgctacctcatttctcatctttttactaaactcaaangcantgacagcagtcagggacagacattcatttcttnataccttcc

SEQ ID NO: 431 - DNA, 761 bp, Homo sapiens
  misc_feature (1)...(761): n = A,T,C or G
tggtgttnnnntcctaatgcttggnngnnnggtnanncttctaattactttggggctcgttctntctcnacnnngcnnggcgttncgaattcggcacgagcttgaagcgctggtttttctcgaagcaatccttattatattgttaaacaaggaaagatcaaccagatggcaacagcaccagattctcagagattaaagctattaagagaagtagctggtactagagtgtatgacgaacgaaaggaagaaagcatctccttaatgaaagaaacagagggcaaacgggaaaaaatcaatgagttgttaaaatacattgaagagagattacatactctagaggaagaaaaggaagaactagctcagtatcagaagtgggataaaatgagacgagccctggaatataccatttacaatcaggaacttaacgagactcgtgccaaacttgatgagctttctgctaagcgagagactagtggagaaaaatccagacaattaagagatgctcancaggatgcaagagataaaatggaggatatcgaacgccaagttagagaattgaaaacaaaaatttcagctatgaaagaagaaaaagaacagcttaatgctgaaagacaagaacngattaagcagaggactaanttggagcttaaagcccaagatttacaagatgaactaccggcaatagtgaacaaaggaaaccgttttttaaaagaaangccnaanctgcttgaaaaaaaaaaaaaaaaactcggcctntaant

SEQ ID NO: 432 - DNA, 748 bp, Homo sapiens
  misc_feature (1)...(748): n = A,T,C or G
gnngantnngtcttattatcgtggngctctnactnnctctaaatanaattgtgttgngggaattcggcacgaggccaccgaagcttcaggatgacatcttagactctcttggtcaggggatcaatgagttaaagactgcagaacaaatcaacgagcatgtttcaggcccctttgtgcagttctttgtcaagattgtgggccattatgcttcctatatcaagcgggaagcaaatgggcaaggccacttccaagaaagatccttctgtaaggctctgacctccaagaccaaccgccgatttgtgaagaagtttgtgaagacacagctcttctcacttttcatccaggaagccgagaagagcaagaatcctcctgcaggctatttccaacagaaaatacttgaatatgaggaacagaagaaacagaagaaaccaagggaaaaaactgtgaaataagagctgtggtgaataagaatgactagagctacacaccatttctggacttcagcccctgccagtgtggcaggatcagcaaaactgtcagcttccaaaatccatatcctcactctgagtcttggtatccaggtatttgtttcaaactggtgtctgagatttggatccctggnattggatttcttaaggacttttgganggctcttgacaccatgcttcacagaacttgggcttcanaagcttcanttttttgcanaggtgccccaggttaggaaaacagttntncttgttttgtannt

SEQ ID NO: 433 - DNA, 769 bp, Homo sapiens
  misc_feature (1)...(769): n = A,T,C or G
gggnaaaagtttnnnannngggnagnnnngntnnaccnttcctattactttggagctcgaactcgcnccacanannnagtgncntgngctgttttgcagatgaggaaaactgaggtacagaattcttagggaacttacccaaaatggcttttctgcactctgccctttggtattgtcccatgtgaattgtttaaaacttatgtgtatagtggcatgagtaggtgatttcagaaacagaactcacttttgttgtttggtcttaaaattaggaacttttcttcatctgggcttcatttccctgcaccttcccagctttctagtcatgcaagccacatgtctccacgtgaggggttcattggaaagcagccacagagccaccccctggctgggttcttccccagctctgcttcctccttccccaagtcctgcagctgctctctccatggcagaaccacttctccccttactggaggggaggtccactgaacaaatccaggagaggaatcattgtgttttccacagaagagaaagtacactggactttctgtgcaacctgttactacattttcacaganactcatatttgtgcantgtaactcaatttgaaacccagcaaaattaggctcccgtgtctccataaaaggccaccatgatggtaaccgttggacttcaccttgtgtttnggacanangctgattggattttacccatcatcacanccgtgtcttacattctcntttcctgggctttggacccctgntanaaaaan

SEQ ID NO: 434 - DNA, 764 bp, Homo sapiens
  misc_feature (1)...(764): n = A,T,C or G
ctanccttcctaaannctnggctactcgntctttctnnanganncnnntgcgatncgaattcggcacgagcaccttgcctggccaaggggctagacctcccaggctaagcctcagattcagtgcaggacacaagctcatgcccccgtcttgccagtgacacttgaagcctcccgacttccacagagtgcttcaggacacattttgagtggtattttcttttctttttttcttcttttttttttttgagatggagtctcgttctgttgcccaggctggagtgcagtggcctgatctcggctcactgcaacctctgcctcccaggttcaagcgattcttctgcctcagcctccagagtagctgggactatagacatgcaccaccacgcccggctaattttgtatttttggtcgagacggggttttgccatgttagtcangctggtcttgaactnctgacctcaagtgatccaccactcggcctccaaagtgttgagatgacaggcacgagccaccagcccaacctgagtggtattttctttagggaccangtagactttaaaacgagggtaagagaaaaagcccagtggtcttttctganggtaaataaatttctgcccaggaaacnttnccaagccccaaccagcaagccaacccttaaaaaaaaaatcacttcgtgttccccaanggganctttnttaaagctttgggggcttccaggnaaaatcatttccagtnnaantttggaagaattcannagnatttnt

SEQ ID NO: 435 - DNA, 755 bp, Homo sapiens
  misc_feature (1)...(755): n = A,T,C or G
gnnnnntttctaatgtggnnnngnnngntaannttctaaancttgggntctcgttctttctncagatnccntcgattcgaattcggcacgagggatcctttccagacagaagaccccttcaaatctgacccatttaaaggagctgaccccttcaaaggcgacccgttccagaatgacccctttgcagaacagcagacaacttcaacagatccatttggaggggaccctttcaaagaaagtgacccattccgtggctctgccactgacgacttcttcaagaaacagacaaagaatgacccatttacctcggatccattcacgaaaaacccttccttaccttcgaagctcgacccctttgaatccagtgatcccttttcatcctccagtgtctcctcaaaaggatcagatccctttggaaccttagatcccttcggaagtgggtccttcaatagtgctgaaggctttgccgacttcagccagatgtccaagggtgcctggggaagagccactgcgcatgttatctttggtgttactccagtgttgaacanagagctggtcagaggcagtgcatcgcanagagacattaataagggaatcctttgaatccctaancagcancagctttnctganggggccnatgatgccagtgacctnttcanggnaagtctgggacattgggaccaccctggggggaagaacttgtgggatgtggcttttcttttatgaataaagtactttgagttggttgnaatcn

SEQ ID NO: 436 - DNA, 760 bp, Homo sapiens
  misc_feature (1)...(760): n = A,T,C or G
aaggctggnnnnngnnntgcnnnncttcntattantctgggggctcgtnctctctcnannnagnnaggcgntgngaattcggcacgagctcaagaaaaggagaaagtttttttgtatgaaattggaggaaatattggggaacgctgccttgatgatgacacttacatgaaggatttatatcagcttaacccaaatgctgagtgggttataaagtcaaagccattgtagaagacttaacaagctgcagataaccatgtggacttctgtcataattcttgctgagtcaagagtgtaaataaaagaaatggcaggactcatattattcagttgtcccaagtatttaaaaatgactctcttaagccttaaaaagtcatagatttgtgctgctgccagaattatattaattattattaatggtattattagaaaaaaaatttctggagtgagagtnaagangcttaattagtttgtgggcagttttcatatgctctgtgaaatgtgtccagatgtgacataagtttttttttttaatatggnggaaatgncttctctttcccattcttttctcctaaaaatcatatatactgggaatatatgcctctnttacctctattaccctcctcacatttaccctttcccagttnggttttgctttttnaccaaaaagattccaatnccnaggtattggcaagttntnaaaaccgcccnttaaacatccctaatttcncagnattccnnncttgccaaatnttngtntcnn

SEQ ID NO: 437 - DNA, 748 bp, Homo sapiens
  misc_feature (1)...(748): n = A,T,C or G
ggnnnnngnnngntnncgttccctattantcaggngctcgntctntctcnannnancnnggcgtgtncgaattcggcacgaggattttcgaaactcttcagctacttgcccttttttatctgaaaccatcataccttctgaaagaaaaaagcatatcttcattgacataacagaagtgagatggcccagtcttgatacagatggtccatgatatatatggagagtggcattgtgaagataacatctttagatggtcatgcatacctctgcctgcccagatctcagcatgaatttacagtacattttttgtgtaaagttagccagaagtcagactcatctgcagtgttgtcagaaacaaataataaagccccaaaagataaactagttgaaaaaactggcaaaatctgtatacgtggaaatttaccaggacagagactgaagaataaagaaaatgagtttcattgccagatcatgaaatccaaagaaactttaaagaagatgagttgtgtaaatggaactgaagggaggggaagaactgccttcgcctggtacaaagcacacatgtgtatacacatgggtcaagcagtgctggtctgtggctgnctgtccagangaatggaaatatccttggctttagcacttcattttcataataaaatcagcaattntgtctaaaaaaaaaaannnanaaaaaactngagcctntanaactntagtgagtcgtattacgtagatncnnacatgataa

SEQ ID NO: 438 - DNA, 823 bp, Homo sapiens
  misc_feature (1)...(823): n = A,T,C or G
taatccttnntattgntcgggtactngntctntctcnaagannntntcgttncgcccaggtagctgagactacccacaccttggtcccagctacttgggaggctgaggtgggaaaatcactttgcccaggaattcaaggccgcagtgagctatgattgcaccactgcactccaggcaacagagtgagaccctgtcttaaaaaaagaagggagaaagtgtcagatggtgatgaggtctgggggggaaatagagaatggggatcaggagtgtggatggtggtattccctcaccaagaggtgacatgttgagcagggaacttgggaggtgagggtgtgacccgtgtggaaatcagggaaaagcattncagcctgagggacagccaatgcanaggccgtgaggtggccagtgccactgagcagtgagcttgggatagggggcangtgangaggctggagagcggggtcagacaaaccaatatgcttatttaaaacaaggttgttncagcacccttgccttaaagccttgagcctgnaanctngaaaaatttgggcacnttcaaaagcangganggaaaccaaaagaagattgggagggaaaagcccttncnttcccttancaggaaatgaagttnccacccttnaaaacaggnccaggacctttttgggacccttttggccttttggttccttagaatcctcttggtngcttnngaatnaaaaggnaaaaggggcctttaaggggggatcccattntttccaaaattcaaagggggctttccctgggcttacccaaaatttcttggncttaantaaaaaaatttntt

SEQ ID NO: 439 - DNA, 767 bp, Homo sapiens
  misc_feature (1)...(767): n = A,T,C or G
gnnnnngnttctaatgctggnnnnnnnnggtaccctttccaaaacctgggctctcgntctttctncangnagccnngcgattcgtctgtctggtgatttttattttaagtgaacctttggatctatctttaactctctttattgtgagtctaaattccaattctgcagcagatcagtaaactcacagtatttttcctgtggaaatctattcaataaggaaaccaagacaggatantaaaatttaaaaaaaancaactttgaattcccctgcctaggtcttccagttgttttccagcgcatacctcaggtatgactttgctagccggggacaaaattagcaccttccgattctctagtccaaatgaactttggctaaataaaaaattattatactacataataaagttncagatagcaggaaatgcaagagctaggagattcctagattatatctggccaagccaaataccttaaacatccacctggaaatcctctaccccctcttctgagataatttgcccagccctttcttcccacacactcactcaatgtcacccccttctaatccccaaaactgtttttgtggccttggtagcctatagtagtttctcacatcttttcccctanacttttctgttttcagtttcagaccaaaaaaactcttcaacttttttccagtggggtcttccttaccagtaactttaccacttgnaatcttatttcattgaaaaaaccttaaatgggntgggaaaaggcttgccnncann

SEQ ID NO: 440 - DNA, 752 bp, Homo sapiens
  misc_feature (1)...(752): n = A,T,C or G
nagnnnnntttctaatgcttggnnnnnnnntcnatgcttccaaaagcngggngctcgttctttctccaagatncnngcgntncgaattcggcacgaggatggatgagactgttgctgagttcatcaagaggaccatcttgaaaatccccatgaatgaactgacaacaatcctgaaggcctgggattttttgtctgaaaatcaactgcagactgtaaatttccgacagagaaaggaatctgtagttcagcacttgatccatctgtgtgaggaaaagcgtgcaagtatcagtgatgctgccctgttagacatcatttatatgcaattcatcagcaccagaaagtttgggatgtttttcagatgagtaaaggaccaggtgaagatgttgacctttttgatatgaaacaatttaaaaatcgttcaagaaaattcttcagagagcattaaaaaatgtgacagtcagcttcagagaaactgaggagaatgcagtctggattcgaattcctggggaacacagtacacaaagccaaaccagtacaaacctcctacgtggtgtctactcccagactncgtacgccttcacgtnctcctncatgctgangcgcaatacaccgcttcttgggtcangaattagaagctactgggaaaatctaccttccgacagaagagatcattttagatntaccgaatgaanaaagcttgcattagtgacattgaaagggaaataaaaattcctacagtcnaaaaaaaaaat

SEQ ID NO: 441 - DNA, 775 bp, Homo sapiens
  misc_feature (1)...(775): n = A,T,C or G
gnagccngattccaaaacctgggnnccgatccaatgcttnccaattacttgggagctcnnactngcncnancaanctngccntgcgaattcggcacgagaagnaggcggagcttgcagtgagctgagatcgcgccactgcactccagcctgggcaacagagtgagactctgtctcaaaaaaaaaaaaaaaaaatggaacgcagggcaagaactcgtntttggaaggagatgggggaaaggancggtattatacctatgttgnatttgcaggcaaatgagatgganccctctctgtaaagaagagtcatttgtgcaagtagacggggtctgtgggtgcangccctggaggggcacacaattgcctgnangcttctgtganatcgggaganggaggagaagcagtctcttgacaaaataaagtatttttattcattngtatttattaaatgaaaaaacaatcccatggtgtcccttgtgtgtggtggaacctaatgactgttgaaataaagtctgngttttcccttcaaaaaaaaaacncnnanaanaaaaactcgagccctntaaaacctntngngagtccgnattaccntanatcccngacnttgataaggatccattgatnaantttgncccaaccccaactnngaatgccnngaaaaaaaattgctttatttgggaaatttgcnaatnctttgctttantttgnacccantttancntcannnnccaagttacnancnncaattgcnttcatttanggttcaaggttcaaggg

SEQ ID NO: 442 - DNA, 804 bp, Homo sapiens
  misc_feature (1)...(804): n = A,T,C or G
gagnnngnttctatacctgggnncgatccaaancttncctattaccttggatcttnngctatctcnaannaaaangcttncgaattcggcacgaggccacctgcactgaggtctgggcccggggacagggtgctttagccaggcttgtctgcgcctcagggaagggtgagcagcccagggaccagatgcaagttggtgggcccctccacccntccnacgccactccccagtgtgctgggtcctaaccagtcgtcctatgggagcagtcagccttcctctcctcctcagggcagctctcccacctgctgntccccgcacacagaacctcattgctctgagcagttgcttattacccagttgttgaaaaactagcatgtganggccgggcgcggtggctcacgcctgtaatcccaacgctttgggangccaangcgggtggatcatgangtcaggagatcaagaccatcctggcttaacacngtgaaaccctgtctctactaaaaatataaaaaagtanccaggcgtggtggtggcccctgtagtnccaanntacttgggaagctnangcangaanaatggcntgaacccaagaaggaagaacnttgcantgaancttaaaattgcgcccactggaatttcaaaccttgggccnanaanaattgaagaatcccgtcttaagaaaaaaggaaaaaantttnccnttntnaaaggcccggccacaantnggctttaacgccctggtaaatncccaancactttttggggaaggcccaaaggcaaggccnggattcaattttnnaaggg

SEQ ID NO: 443 - DNA, 786 bp, Homo sapiens
  misc_feature (1)...(786): n = A,T,C or G
gnagccggatcttattattggcnncgntttaatgctggctaatntntcgtaatncttggtnnccccaannannnaggnggggngaattcggcacgagcaccatttttattttgatgcttacactcatttattctgtttttgtaaaacagtttcaagaatttaaaaatccttccagttaatagagcttttgttattatattataattttgtaaacccactttgtttttcccactttaaagccacagggtcgactcatggatgatacctctattgctgctgcatgatgttcaagaccggcccttggctgttgttacagagatgttgggcagagctatgcaggtgtttcattgngaactctagctttgatcatggtaaaaagttaaccctttctattttttaatggatgttataccaactattcagaggactcatacttcaaaaatattaggaaaatctgtcttatagttctctaataaatatctgaaatctcaagtacgacatgaaagaatgtcagaccattgntattggtgaaagtcatttgatgaatggnaaattctatgaaaagtaagtggatttgcatggattaatatcagggaaaatttaagccttcccaagtgtgactgggccaaagagagccagatgcccccagtgcctgtgcccataaagttcccgaatcccccaatggggtctnttttcaaaaacttggnccagacccggaaaataaaancattcntcataaattcaannggggncctcangaaacacnttcccccancaacccttngg

SEQ ID NO: 444 - DNA, 760 bp, Homo sapiens
  misc_feature (1)...(760): n = A,T,C or G
gnagnccggttcnnangcntnggctnnatccaatgctggctaaagttcnaananctggcaacnccagganncangcgttgcgaattcggcacgaggaggaattacaggtagcaaattatggagttggaggacagtatgaaccccattttgactttgcacggaaagatgagccagatgctttcaaagagctggggacaggaaatagaattgctacatggctgtttnatatgagtgatgtgtctgcaggaggagccactgtttttcctgaagttggagctagtgtttggcccaaaaaaggaactgctgttttctggtataatctgttgccagtgggagaaggagattatagtacacggcatgcagcctgtccagtgctagttgcaacaaatgggtatccaataaatggctccatgaacgtggacaagaattcgaagaccttgtacgttgtcagaattggaatgacaaacaggcttccctttttctcctatnggtgnactcttatgtgctgatatnccatttcctagtcttaactttcaggagtttacaatngctaacactncatgatngattcantcatgaacctcatccatgttcatctgnggcaattgcttaccttgggggntcttttaaaaagtaccacgaaatcatcatattgcattaaaacccttaaaagttctggtgggnatcacagaagacaaggccnaanttnaaagnggaggaattttattatttaaaagaaccttttgggtnggatnaaaan

SEQ ID NO: 445 - DNA, 761 bp, Homo sapiens
  misc_feature (1)...(761): n = A,T,C or G
tggtgccggttcttantctgngctctcgtcttccttcttatacctgggcancncttggcggccccnaggntcccangnagccnngcngngncngattcggcacgagattccaaaggtttcaaagaacttggtcataaatatgataatgagaagacaaagtatttatattaaaacagtttagtagccttcagttttgtgaaaatagttttcagcacagaaactgacttctttagacaaagttttaaccaatgatggtgtttgcttctaggatatacactttaaaagaactcactgtcccagtggtggtcattgatggcctttagtaaattggagctgcttaatcatattgatatctaatttcttttaaccacaatgaattgtccttaattaccaacagtgaagcactacaggaggcaactgtggcattgcttccttaaccagctcatggtgtgtgaatgttataaaattgtcactcagatatattttttaaatgtaatgttatataagatgatcatgtgatgtgtccaaactatggtgaaaagtgccagtggtagtaactgtgtaaagtttctaattcacaacnttaattcctttaaaatncacanccttctgcctctgnatttggaagttgtcagtncaactcatcaaagaaaactgcctaatntnaaaatcatattntgggaataatttccctcttttgtagtctgcccaagatccttaaagattggatttttattactatttaaaccagtggattaatn

SEQ ID NO: 446 - DNA, 770 bp, Homo sapiens
  misc_feature (1)...(770): n = A,T,C or G
tgggnnngnnccnaangcnggggannnggtccccgttccaanactggaanncttggcanncgaactcgctcnannagnaaggccgggngaattcggcacgaggccccgctccatgagcagtgactccccagctcctcctggcaccagtccccagggctctcctgttggtagttcctgcttttcttcttggaaattcctcgtggacctcgagatctttaccctaaaatagttctgttgaatttcaccctggcaatgtaaattgatagcttatcttcacagatgccagacaatggacaactcaccatcagtcctctgctcacctgagacaaatgcatgtctgattgcttcctctgccctattggntatgtgaaaatgcagattcactgagccagactaaggcatcagtgactggtcctctacctgcctctcacatggagattgggtattcagtgaaaggctgatcaaagacccaaaggaatgcaacagtttatctcttatctacctatgacctgcganctgccaccacccccagntggngcgcctttccagacagaaccagtgtacatcttacacgtattaaatngatgtcccnggggctcccnaanangnatcaaacaagcngggcctcgaccaccttgggcacatatcccnanggacatcannctggaggctngngncactggcattggccctnaccctnggcaaaataaaccttctaaaattggnaaaaaanaaanaanaaaaacctngnnccctntnanaacnntacg

SEQ ID NO: 447 - DNA, 757 bp, Homo sapiens
  misc_feature (1)...(757): n = A,T,C or G
tggtatnntttnaangctggnngnnnggcnccgttccaatgnctgggancnttggcaatcgctctttccgnangatcccatcgattcggtctgatgcaggagaattgctaaaacccaggagggagaggttncattgagccgagattgcgccactgcactctagcctgggcgacagagcaagactccgtctcgaaagaaagaaagagaaaggaaattccccagggaagtacctcggcttatttcataaacaggtactgaaggaagcagaggcatgtggaggacttccccacctcgtgcagctatttgggccgtggcatctgaaatttcttatttcagagtcacccctttgatgaccttggcagtgaactgcagtcatctgtttaggcctttccatggcccacgtcaatgccggtatttctgtttgttgcacatttgatttccttgttgttggcatttagaaggccccccgtttcccagatcacaccacgggcatggaccacagagattgcatcttgtgagtctgtagaaatggtcaaggccttgtcctctcttaagtccagagctcangttaatgcaaaattttnccggncatctgtgctgaaatccctttggggaagctcctggctggtttcctgtaggtaggacagctacacgtnctgccctttattggcttcttttcatgaagctcctgccatntacnaaacatgtctcccttcttgaatcacatctctggtattgnaactctanaatcgcccgg

SEQ ID NO: 448 - DNA, 770 bp, Homo sapiens
  misc_feature (1)...(770): n = A,T,C or G
gggtgnnnngtttctaatgcttggtngnncnggnccnacntttctaatgttcggaanggcttggctactcgntctttctncangnagcccntcggtncgaattcggcacgaggtgtcttcatcttacccagtggaacctaagaaattaaattctccagaagaaactgcttttcagacaccaaaatctagccagatgcctcggccttcagtgccaccattagttaaaacatcactgttttcttcaaaattatctacacctgatgttgtgagcccatttgggaccccatttggctctagtgtaatgaatcggatggctggaatttttgatgtaaacacctgctatgggtcaccgcaaagtcctcagctaataagaagggggccaagattgtggacatcagcttctgatcagcaaatgactgaattttctaatccttctccatctacctctattagtgctgagggtaagacaatgagacaacccagtgtgatttattcatggattcagaataaacgtgaacagattaagaatttcttgtcaaaacgggtgctgataatgtattttttcagtaagcacccagaggcctncattcaggctgttttttcagatgcccaaatgcatatttgggcattagaaaggtctgtcgcacttagtagcagcatcattttacagaggatagatttggagttgtccagacgacactaccagctatccttaatactttgttgacacttgcaagangcagtcngacaagtactttaacttcctcatg

SEQ ID NO: 449 - DNA, 792 bp, Homo sapiens
  misc_feature (1)...(792): n = A,T,C or G
ngagaaangtttctaatgctggnnnngnnagntcancctttctaatgttctaatacttggganntcgaactntcncnacacagnnangcnntgcgaattcggcacgaggncnnctcnatnatnacttgntcncancggnctggcatcnacncgncacacctacntnagcgcnttgtagcgcaatatncacctnntnaaacccnnnagtcccagggctctgccnnnnnactgntcaactgacnaacnacnnnctancncaacntnnnnttangccnctgnctgnctctatggcacctnncctnccntcncncntnacccnctacgctcagggctatatacaatgggaaccttnccaacagtaanccntggatctnaggnatggcccttgnctggcggatcacagccttnnagcntatcagnatcttgaggaagacaccattccgtcccngattntgaccaancnctcggatgtgnctatgggctcnattgaggnacaacaactnncactgcnnataggccatcctcnnnannctacacatgngactttncnnnncatntnaaatgnnnanatgtctctcncaagcatcacccnctgtccctncgncntcntggaagaccttctgnncaactganctccttcntgnnncnnnngattnttncnnncnnaatatncntnccccaatgnccttgtnnngnatttatnangggntttccaatttgggntaattcantncccnccgnannctannnncccatnaaccntcngngccttcttgnaaccttttnncctgg

SEQ ID NO: 450 - DNA, 848 bp, Homo sapiens
  misc_feature (1)...(848): n = A,T,C or G
gnatgncccgatttccttaatgatggggnnnnnnngagcganncttccgaaanttccaatannctgggngntcgcaactcnctcnanacagnaaggncgngggctttgctctctccattccaagttgntctctgttctagaaagcagatgtagtagacatctactgttgttgcctgaacagaatccctttgtcctttttttgntaaaagtactcatccctaatattcattgtnctggaaggactgaaaatacagaactcacaccatgatcggccgggacaatcagattatttcattccncagcaaacggagatcganccgaaaagtggaaanatgagcncttctttggngttggcatatggaccctgagagaaagaactntnattntttctcttggactgcaataaagtatagctgcctaaaatacgnttcctgacacttggaggnttgtccacaatcggngaaataaaggcgagaccgnacactggatgaaaaaaanaagnnnccngnngaanacccactnnnccannnnccnnnccnntncnccanngnnganccnnntanccgnnannaggccnnngcnntngcnncnnngccnnnnnnnnnngggnaaacccnnnngnnnnncnnnnnnnnnnncnnnnnannnnnnnncnncnngnnggnnctnnnnnnannnnccccnncnncccnncnccnnnnggnaannccnnnnnnnannannnngggnnnnnncnannnccnnnnnnnncannncnncncnnnnnggnnnnnnncnnnnnnnnnnnnnnncnngngnnnacnnnngngnnnnnccnnnnnnnnnncnggnnnnncnnnnnnnncccc

SEQ ID NO: 451 - DNA, 765 bp, Homo sapiens
  misc_feature (1)...(765): n = A,T,C or G
gnnnnnnntttcctaaatgcttgggnnnnnnnngagngnnnttncnnagtttcctaantagcttnggcnactcgttctntctncangcagnnnntgcgtngncgaattcggcacgagcattcctcctttgttaacgaagcaacatttacacaagatggacattacattattagtgcatcctctgatggcactgtaaagatctggaatatgaagaccacagaatgttcaaatacctttaaatccctgggcagcaccgcagggacagatattaccgtcaacagtgtgattctacttcctaaaaaccctgagcactttgtggtgtgcaacagatcaaacacggtggtcatcatgaacatgcaggggcagattgcagaagcttcagttctggtaaaagagaaggtggggactttgtttgctgtgccctctctcccgtggtgaatggatctactgtgtaggggaggactttgtgctctactggttcagtcagtcactggcaaactggagagaactttgacagtgcacganaaggatgtgattggtattgcacatcaccctcatcagaacctgattgctcctacagtgaagatggactcctaaagctctggaaaccataattcaacttttcttttttaaatcaactcgaaagcatgtncttaaatgaacatattcatgtaangggctttttttttttgncacttttctaagcaaatagatggctgaattagtcacngaataaatttgngaaaatcatggttaaatnccaac

SEQ ID NO: 452 - DNA, 765 bp, Homo sapiens
  misc_feature (1)...(765): n = A,T,C or G
nnngnnnnnnntttcctaaatgcttggggnnnnnnngngnnnnnnttctnatgttcctanngcnnnggngctcgttctntctncacgnngccngtgcggtgncggtctgattgaaagctgttcaggtttatcatgcaaatcctcgcctctggctacggctggctgaatgctgcattgctgccaataaggggacttctgaacaagaaactaaaggccttcccagcaaaaaaggaattgtncagtctattgttggtcaagctatcatcgtaaaatagttttggcatcacagtctatacagaatactgtttataatgatgggcagtcttcggccattcctgtaccagtatggagtttgcagccatatgtctcagaaatgccttgttgctgctcctgaagaacagcaagatccaaagcaggaaaatggggctaaaaatagtaatcaattaggtgggaacacagagagcacgaaagcagtgaaacttgcagcagtnaaagccatgatggagatnaattcattccagcttcaccttcttctccattgagaaaacaggaattagaaaacttaaagtgctccatacttgcttgcagtgcctacgtggctctggcttttgggtgatacctcatggctttgaatcatgcngatnaacttcttcagcagcccaagctgcaggatctcttaagttttgggacatttatatgctgcagaacccttatcttcttcgacngaatntctgtgccnttctcacttgaccccgagaatgtnct

SEQ ID NO: 453 - DNA, 833 bp, Homo sapiens
  misc_feature (1)...(833): n = A,T,C or G
gngtnnnnntttctaangttcntaatannntnggctactcgttctttctccaggnatcccntgcgattcgaattcggcacgagagaaacgttctcaggttgaccagctgctgaatatttctttaagggaggaagaacttagtaagtcattgcagtgcatggataacaatcttctgcaagcccgtgcagcccttcagacagcttatgtggaagtcaagaggctacttatgctcaagcagcagatactatggagatgaatgcactgaggacccatagaatacagattctacaggggattacaagaaacatatgaaccttcttgagcaccccaggttttggcattagaaaatgggtaccccttggttcaaaaatgaacaaagaaagccttagatttggatgggggaacctgatctgtccagtctagaaggattccagtggggaaagtgtttccatttccttngtcccctggcttggccaaggaaagcgaaagccctttcttgaanagcaaccgtggatcattngaccaggaacttccttctggggtattaagcttctttcaantggaagggaaaggttccanggccaaaggaaaaatggaagcccccaaccngatgggtttcaccctaantaacctcaattggaagggcttggaccaagaacccnggaaaggcnanccattgcacccttaaaancaaggaaagtggaccacctttggggcttgncnttccnttccgaaccaggttgaaaangggcttgaaaaatggttgcttacccaaaagggcgnacnttaatggcaccaattattcctntggaccntttttaatancctttngn

SEQ ID NO: 454 - DNA, 737 bp, Homo sapiens
  misc_feature (1)...(737): n = A,T,C or G
gnggnnnnttctaagttcctaatnctgggctactngttctttctgcaggnatcccatcgattcggcaaaatcaatgtggactgaacataaatcacctgatggaaggacttactactacaacactgaaaccaaacagtctacctgggagaaaccagatgatcttaaaacacctgctgagcaactcttatctaaatgcccctggaaggaatncaaatcagattctggaagccttactattataattctcaaaacaaaagaatctcgcttgggccaacctaaagaacttgaggatcttgaagcaatgatcaaagcttgaagaaagcagtaagcaagaagagtgcaccacaacatcaacagccccagtccctacaacagaaattccgaccacaatgagcaccatggctgctgcccgaagcagcagctgctgttgttgcagcagcagcagcggcagcagcagcagcagctgcagccaatgctaatgcttccacttctgcttctaatactgtcagtggaactgttccagttgttcctgacctgaagttacttccattggtgctactgntgtagataatgagaatacagtaactatttcaactgaggaacaagcacaacttactagtacccctgctattcaggatcaaagtgtggaaagtatncagtaatctggagaagaaacatnttaaccaggaaactgtanctgattttacttccaaaaaagaagaagaggagagccacct

SEQ ID NO: 455 - DNA, 718 bp, Homo sapiens
  misc_feature (1)...(718): n = A,T,C or G
ggnnnnnntttnnncngttncntaaaannctgggctactcgttctttctncangnagcccntgcgatncgaattcggcacgaggatgaggagtgtttaatcattgatacagaatgtaaaaataatagtgatggaaagacagctgttgtgggttctaacttaagttccagaccagctagtccaaattcttcctcaggacaggcttctgtaggaaaccagactaatactgcttgtagtcctgaagagtcatgtgttttaaaaaaacctatcaaacgagtatataaaaaattgatccagttggagagattttaaaaatgcaggatgagctcttaaagccaatttccagaaaagtaccagaattgcccttaatgaatttagaaaattctaaacagccttctgtttctgagcaattgtctggtccttcagactcctctagttggcccgaaatctggatggccttctgcatttcagaagccaaaaggacgattgccatatgaacttcaggactatgttgaagatacatcggaatacctagctcctcaggaaggaaattttggttataagttatttagcctgcaagacctgttgttctcgtcgctgcagtgtncagaggatagagncagaccacgttctaaaacngagaaatcagaagacatttncagttatgtctccaaaagtgagtntcagctgtatgagttgactctgctgaaagtgacttg

SEQ ID NO: 456 - DNA, 739 bp, Homo sapiens
  misc_feature (1)...(739): n = A,T,C or G
gtggnnnnttctnngtttccaatangntgggtctcgttctttctnnacgatcnnntgcgattcgcttgggaggctgagtcaggagaaattgcttgagcccaggagatggaggttgcagtgagccaagatcatgccactgcactccagactgggcaacagagggagactccgtctcaaaaactaaaaaaaaaaatncatttagtataccggggggtgggggggagaaataatgttatttcctatgcgaaatgacgtgtatccctgtacccatgggtaaatgtaaatatactgtgtctcttttgggagagccttttagtagaggagtcttatatgaagtctctcataagtagttcacttgagttttgcagtttgaaatcttaaaggagctttaattgacatttattataccaattaagcttggaatggggcaatggatgcatttccaaaacgtgtgaaagcctaacagcttatattgctgaatgagaatctcctgggtgtaatttancacttagggaactgcgtgaacactcccagccattatgatgctggtaccagctttantgtntaaatgccatgantattctttctgntctgttttgtgctctcttggtncatttattttaccctttacngaataatttcttgtaaaatccntaaaaatntttggcatttaaaagtccnntcttggantnaananannnnnaanaaaaancttncccctttanaactttngngggct

SEQ ID NO: 457 - DNA, 743 bp, Homo sapiens
  misc_feature (1)...(743): n = A,T,C or G
gtgnnntnnttctnnngtttccaattantctgggngctcgttctttctcnanncnnnnantggttgncgaattcggcacgaggnnanagggnagctacatgnntnaccntnttngnnctctcagccangctcnnctnnnnctggtcctactgctacatagaacacttgttntncnnggnaactnntntatgtnnccnngantctctgnnactngtttaaatgctanttgataacaggctatgcaaggnctgnaagtgganagcgtcatcattcatcatncntnttanctngantnnntgtatcctacatgctttgattggtaaatgngcntcagactgggactctcaataaatgnatatagangancttgctgtggaaanctgtcctctcntatctntncatgngnaanttccactncagtntgaactccaaatgcnntnatnggnganccctncttgtatagtggtgtccattccaanctgcnagggnctagaaaccgtcggctntnggaaacnatggtgnnagttganctggtacangcngttntcacctgcanctaccataaaatgggnttacccaagctttatcatggaatggntataaaaaacgcattnattgngcctttntaancccattatntgttnaatttnacttatggttccccccattnaaattatncaattgggnanngangcttcnagtcnccatntttnaatggnnttnncaaaaaaacgntttttttt

SEQ ID NO: 458 - DNA, 906 bp, Homo sapiens
  misc_feature (1)...(906): n = A,T,C or G
gnngnnnnnnnttnctaatgcttgggnncncgtttctannnnnnnnnnaanntttcctaattggttaggngctcgnnctntctccacnnagnnnngcggtgcgaattcggcacgaggctgaatcaaggatcacaaactncacatttngcacnttggtctncacatncntggttngggcagtcncagtnaacatggctntggaaactnatnttngnctngcntcaaccatctcgttcccnggggacccannntccnnnatcncgnnttncctcgnnnatnggagngctncttngnccannnatgggctcccnanaatangnntnncnnngnnnatncancnncngncaannggntcnncntnnnnnngccctnntncctnatggnnngctncatgncccatnnnnnnggnnancaataannnaaanggtctnttcccncganncccnnnnnccnctaacanngnacctcgcaaagggccccaggcnttnnctngnaaaccannttngccaanggtanttcaaaggnngccttngggacctcccnannnngccntggnnntaccccgggnaaanggtngnaaacccnnccnnngntgccnnncccggncnnggaaanaaatttccnnggnacccagnntnccnccgnaannnanantannncccancccnaacnttnngcccncanccnttngnnnntgnantcnncnnnccctttnnnntnnccaanncggccnggnnacnnncttnnacctntttncncnnaanngacnccaanntcctnnannaaagggnggnnnnnnnnnncnttnccnnnggnagcccnnnnnncctnncntnncnnaaaaattcnncnntgnancncccctnnnntnangngncccnatnnnnnnnnnngnaaancnnaccc

SEQ ID NO: 459 - DNA, 765 bp, Homo sapiens
  misc_feature (1)...(765): n = A,T,C or G
gnngnnnnggnttcctaangctggggnccgntctnnnnnnnnnnnnnngttcctaaanacctaggngctcgntctngctccacgcagncngggcgtgggcgaattcggcacgagcttctgttgattggtttgtttaaagtacctaagtactaccctttgactccctaccaaaagttcttttgttttttaaacaacttttatttgtgacttactttcttgagaagngttcttaatgaattgcataaaatagtggtagcagcttatttcttaagtncttnattattggggctttaccattcaggtcttatctttaacccttatttactcagttttccatctgaatgatcctatctctaaatnaaggatttaataaatgctgcaaattgtccactttgcaaatngtccaaaagctttagttttggaccttgngaactttttttttaataacacattatttgggcccggtcgtggtggctcaagcctgtaatcgcagcactttggaatgcctaggcagacagatcacttaangcctggagttcgagaccagcctggccaatgtggtgaagacctccggttctattactaaaaatnctaaaaaattancaaggcatggnggtgcacgcctgnaatctcagctacttgagangcaaatcnggagaaatgcttgaccngggangcananatganccnanattgcaccactgcattccacctggggannanantgagaanctggctcaaaacccaaaaacccaaaaaaaaaan

SEQ ID NO: 460 - DNA, 677 bp, Homo sapiens
  misc_feature (1)...(677): n = A,T,C or G
gtttncgctgggagccaccaacatagcagattaccatgtgaagttgccactgctgcatctcctgaaacctggctgatgggagaggtctcattttgtgtctgagaatgtccaggttgtctgcagaccacagcactgatttcccattagcagttattatttcctggccatttcttcctgaaggttttgtggttaaactccctgtcctcaatattttatcagcagtagggctgtcattcttctggttatcaacctctacattatgaagtaaggttcaacccttctgcttttctcaggcccccaaaacggttcctatccaatcgaacacaaaaacgggtattgagaaggaattggcagggctcagtggctgtttccgttgctcctacctcatggagactcttactcatgctggatttattgagagaacttctaactgaccactcacccccacccactcttatgcagtctgttcattcctgaaaacaccactttcatccctcctgcacacaacccatgagggattgctacttcctataagattcctcagtgagccttatagagttgctgcgagaattacatttggtcatgatgtcaagtgtctggtatgtagctnatgcttattgaacacatagtaatttattggaataattgncatgatcactggatgagaatatagcccn

SEQ ID NO: 461 - DNA, 787 bp, Homo sapiens
  misc_feature (1)...(787): n = A,T,C or G
gnnnnnnnagggnnnngnggggcctcncaaagcccgngcnacaggtccccgttccaaagcntgggngancgcnncgccccancagnaaggcgggggaangcggcacgaggacatcatcnncttattctagtaagagaaagtacacagattcaactttagagaggacnggggggnnnncnggagcnaaatcaaggaaggantatcacgnggccncccnngaatataannnngaagctgngaacagnaccatcagnaacannnnatggacagctctgatggggnnnataccacggcactctncnnaccnnnggnggaagcnatccggagnnatgactgangngnaaagnggnnnactgnnagaanccnggngngctaggannctgggagagncactttcangaagnnaccnggcgangagncatcanaagaacccgganaagngagaagacnggaaaaagnncncancgnacngagcccagnnannnncnctgagccangggctncgaaangccccaccngaagcnccatcacanggnacaaggnnngggaaaaggaancnacnnngcngacangnccnccnaanagngccaaancacngcnnngcccncncgcccaaagaanacnggacngcnggcncnnancanaaggagcncnanggcccnnggnaangaaactncnagnagcccaancccaaaggccccnanggannnccnncaaggggaaaacannanncacccaaggggcctgggcnaanaaggcnncccacncnggcccnccnncnnnaccg

SEQ ID NO: 462 - DNA, 747 bp, Homo sapiens
  misc_feature (1)...(747): n = A,T,C or G
ctaatggcttggnnnnnnngnnnnccgnttcttaattgncttgggcnnctcgctctntctccannnagnnnntgcgttngcgaattcggcacgagcctcagccccacaccagctctatttcaggggtgagagtcagagagcactgcaatatgtgcttcatgggatttcgattcgaagatcctagaccagggagacactgtgagccagggatacaacaaaatactaggtaagtcactgcagaccgacctccctgcagtttgggaaagaagctgggtttgtggagaatcagagcatcttgacatgactgctgacctaaagatccctggcattggccagggatcctgtggaacctcttctagttcaggggtgtgagcattagactgccagttgtctagtgacatctgatgcttgctgtgaacttttaagatccccgaatcctgagcacctcaatctttaattgccctgtattccgaagggtaatataatttatctggatggaaattttaaagatgaatcccccttttttcttttctnctctcttttctttccttctccctttcttctttgccttctaaatatactgaaatgatttanatatgtgtcaccaattaatgatcttttattcaatctaagaaatggnttaagtttttctctttagctctatggcatttcactcaagtgggacaggggaaaaagtaantgccatnggctccaaagaattnntttatgttttagctatttaaaaaa

SEQ ID NO: 463 - DNA, 750 bp, Homo sapiens
  misc_feature (1)...(750): n = A,T,C or G
tncctttctaangcnnntngnnaanngtcnccgttctaantncttgggcagnncgctctntctncanncagncnntgcgttgcgaattcggcacgaggcgagatgaagctacactgtgaggtggaggtgatcagccggcacttgcccgccttggggcttaagaaccggggcaagggcgtccgagccgtgttgagcctctgtcagcagacttccaggagtcagccgccggtccgagccttcctgctcatctccaccctgaaggacaagcgcgggacccgctatgagctaagggagaacattgagcaattcttcaccaaatttgtagatgaggggaaagccactgttcggttaaaggagcctcctgtggatatctgtctaagtaaggattccatatggctctcatatcattccattccatctctgccaagatttggataccgcaaaaatttgtgttngnggaagattctgnctgaactctttcattcaaggaactactaccatgaatctgcattctgntgcccacactgaggncttagtagataattgggtggtctgaaacacctattatctcttatntctggtctctangctggnatgttaattcctctgaaatgntaaaagtaatgggtganaccngaaaaagaaatttcaatnacagatcaanntggggngcatgtatnattttcaagcgtcaaaatggaataagggaagantnctggatacctgcttggaaaaggaagnatgtgtatn

SEQ ID NO: 464 - DNA, 748 bp, Homo sapiens
  misc_feature (1)...(748): n = A,T,C or G
gnngtgtctttgnaaagcctttggggaanngncnccttctaatgcttggctatcgntctttacgcagnncccatcgattcgaattcggcacgaggccggccggcgacgctggcgacgctttcgcccctgaggtagtttggcgaccgcgaagaaggaaaaagggcgggcgggcggctgtcctctcaccgtcctcaccccgcgaggcccggcccgctcctccgtcgtggatttcgcggcgatccccccggcagctctttgcaaagctgcttgaaacttctcccaaactcggcatggatacgactgcggcggcggcgctgcctgcttttgtggcgctcttgctcctctctccttggcctctcctgggatcggcccaaggccagttctccgcaggttggntgcttctttcgttctctcctctgggggctctgaagtttcaccaggtggacgctggggagcgggctcccgagcacttgtctacctnccgccagtcctgacaacttttctggccaacctacccagcttcgcttggctggcgagcgcatctgctgctggggttcgcggtgcaaatggagacgcagtggtggccagagggtgatggagaagacgggaaaagcgacagccacgctnctggcttgaagccgcaggacgcaaataacttactttggacctgacagttctacgttgntgtggangccctgtttcctggaaataaaactcaaaatggtggttttttggaaaaaaaaaaaat

SEQ ID NO: 465 - DNA, 863 bp, Homo sapiens
  misc_feature (1)...(863): n = A,T,C or G
gggnnnnnnnaanggnnnnnggnnnnngtcccgttccaangaccnngagatcgnngncgctccanaagaaaggcggtgngaattcggcacgagacctgtaccgcctggccactggctgtcaccggcgtgatgagctgccggtgtttgaacgcngcctatgcngggactttcccggcanannggcnngaanatggccnccatncaggaagccgcccagaacctcctnggnnacacnacttnagngccttcnagtccgntggnacccggnccaagccccggcaancnctgccccgggtcnccgttcccaaggccaaccagccctgggnacccccggggagccgaaacnctggggctngganaccgngantgagagncncacttttcnntgtanacacgggcccagganacanctntgctcgtggccccggggnaaannnnnnnnnnnnnnnnnnnnnnnnnnnnnnnnnnnnnnnnnnnnnnnnnnnnnnnnnnnnnnnnnnnnnnnnnnnnnnnnnnnnnnnnnnnnnnnnnnnnnnnnnnnnnnnnnnnnnnnnnnnnnnnnnnnnnnnnnnnnnnnnnnnnnnnnnnnnnnnnnnnnnnnnnnnnnnnnnnnnnnnnnnnnnnnnnnnnnnnnnnnnnnnnnnnnnnnnnnnnnnnnnnnnnnnnnnnnnnnnnnnnnnnnnnnnnnnnnnnnnnnnnnnnnnnnnnnnnnnnnnnnnnnnnnnnnnnnnnnnnnnnnnnnnnnnnnnnnnnnnnnnnnnnnnnnnnnnnnnnnnnnnnnnnnnnnnnnnnnnnnnnnnnnnnnnnnnnnnnnnnnnnnnnnnnnnnnnnnnnnnnnnnnnnnnnnnnnnnnnnnnnnnncc

SEQ ID NO: 466 - DNA, 713 bp, Homo sapiens
  misc_feature (1)...(713): n = A,T,C or G
ngtctttcgagcntggngntcgttctngctcnannanattggttgngggaattcggcacgagcctcagccccacaccagctctatttcaggggtgagagtcagagagcactgcaatatgtgcntcatgggatttcgattcgaagatcctagaccagggagacactgtgagccagggatacaacaaaatactaggtaagtcactgcagaccgacctccctgcagtttgggaaagaagctgggtttgtggagaatcagagcatcttgacatgactgctgacctaaagatccctggcattggccagggatcctgtggaacctcttctagttcaggggtgtgagcattagactgccagttgtctagtgacatctgatgcttgctgtgaacttttaagatccccgaatcctgagcacctcaatctttaattgccctgtattccgaagggtaatataatttatctggatggaaattttaaagatgaatcccccttttttcttttcttctctcttttctttccttctccctttcttctttgccttctaaatatactgaaatgatttagatatgtgtcaacaattaatgatcttttatcaatctaagaaaatggtttaattttttctctttactctatggcanttcactcaantggacaggggaaaaaagtaattgccatgggcttccaaaagaattgntttatgntttagctatttnaaa

SEQ ID NO: 467 - DNA, 732 bp, Homo sapiens
  misc_feature (1)...(732): n = A,T,C or G
gnnnggtnntctaatncttgnnnnnnnntcncccttctaagccntggnctcgnctnnccnacnancnggcttncgaattcggcacgaggcgagatgaactacactgtgaggtggaggtgatcagccggcacttgcccgccttggggcttangaaccggggcaagggcgtccgagccgtgttgagcctctgtcagcagacttccaggagtcagccgccggtccgagccttcctgctcatctccaccctgaaggacaagcgcgggacccgctatgagctaagggagaacattgagcaattcttcaccaaatttgtagatgaggggaaagccactgttcggttaaaggagcctcctgtggatatctgtctaagtaaggattccatatggctctcatatcattccattccatctctgccaagatttggataccgcaaaaatttgtgtttgtggaagattctgtctgaactctttcattcaaggaactactaccatgaatctgcattctgntgcccacactgtggtcttagtagataatttgggtggtctgaagcacctattatctcttatttctggtctctaggctggtatgttaatcctctgatatgttaaaagtaatgggtgagaccngaaaaagaaatttcaatacngatcaantttggggtgcatgttgaatttgcaacctcaaattggagtaagggaanattctggatacttgctggaaaggaggaatgtn

SEQ ID NO: 468 - DNA, 748 bp, Homo sapiens
  misc_feature (1)...(748): n = A,T,C or G
gnnagnnttctaatngcttgtnnnnnnnnagacgttctaannctttggcnatcgttntttctncagnannccntcgattcgaattcggcacgaggccggccggcgacgctggcgacgctttcgcccctgaggtagtttggcgaccgcgaagaaggaaaaagggcgggcgggcggctgtcctctcaccgtcctcaccccgcgaggcccggcccgctcctncgtcgtggatttcgcggcgatccccccggcagctctttgcaaagctgcttgaaacttctcccaaactcggcatggatacgactgcggcggcggcgctgcctgcttttgtggcgctcttgctcctctctccttggcctctcctgggatcggcccaaggccagttctccgcaggttggttgcttctttcgttctctcctctgggggctctgaagtttcaccaggtggacgctggggagcgggctcccgagcacttgtctaccttccgccagtcctgacaacttttctggccaacctacccagcttcgcttggctggcgagcgcatctgctgctggggttcgcggtgcagatggagacgcantggtggccagagggtgatggagaagacgggaaaaagcgacagccaagctcctggctgaaaccgcaaggacgcaaaataacttactttgnacctgacagtttctnacgtttgttgtggangccctgtttcctgggaaataaactcaaattggtggtttcttggaaaaaaaa

SEQ ID NO: 469 - DNA, 776 bp, Homo sapiens
  misc_feature (1)...(776): n = A,T,C or G
gggngntctaatgcttgnnntgattctccgtctataacnggntaatncttggncctacnaaaaggctangngaattcggcacgagacctgtaccgcctggccactggctgtcaccggcgtgatgagctgccggtgtttgaacgcaacctatgctggactctcccggcagactgcctggatatggtcgccatgcaggaagccgcccagcacctcctcggcacacacgacttcagcgccttccantccgctggcagcccggtgccgagccccgtgcgaacgctgcgccgggtctccgtttccccaggccaagccagccccttggtcacccccgaggagagcaggaagctgcggttctggaacctggagtttgagagccagtctttcctgtatagacaggtacngaggatgacngctgtgctggtggccgtggggcttnaanntnannnnnnnnnnccnnnaccaantctncnnannannnnnccnacnnntaaaantnncnnncnnnnncannnnnnnnnnccnnnnannccnnnncttnnnnaancnnnnnnnnnnnnancnnnncancnannnnnnnnnannncnnncnnnnnnnnnncnnnnnnnnnnnnannccnnnnnnnnantnnnnnannnnnnnnnnnnnnnnnaaannnnnnnnnnnnnnnnnnnnnnnnnnnnnnnnnnnnnnncncnnnnnnnnnnnncnnnnnnnnnnnnccnnnnnnnnnnnnnccnnnnnnnnntnnnnnnnnnnntnnnnnnnnnnnnnnnnc

SEQ ID NO: 470 - DNA, 765 bp, Homo sapiens
  misc_feature (1)...(765): n = A,T,C or G
tatgnntttnctaaaatncntgggcaanacgtcctcnctttcctaanagnttnggcanaacccttggcaanacgccngtnacccanacncagnnnggccgtggcgggcgagcgggcaacagctcttgaggagtgagactgcnggagatntgggccgtgccaaagagatggatgagactggtgctgagttcatcaagaggaccatcttgaaaatccccatgaatgaactgacaacaatcctgaaggcctgggattttttgtctgaaaatcaactgcagactgtaaatttccgacagagaaaggaatctgtagttcagcacttgatccatctgtgtgaggaaaagcgtgcaagtatcagtgatgctgccctgttagacatcatttatatgcaatttcatcagcaccagaaagtttgggatgtttntcagatgagtaaaggaccaggtgaagatgttgacctttttgatatgaaacantttaaaaattcgttcaagaaaattcttcanagagcattaaaaaatgtgacagtcagcttcagagaaactgangagaatgcannctggattccaattgcccggggaacacagtacacaaagcccaaccagtcaaacctacctacgngggggactactccagactcccgnacnccttcacgtcctcctccatgctgaggcgcaatcaccgcttctgggncaagaagttanaaacnctgggaaaaactacctncgacaagaaggggancatttanatttacccnaaatgaana

SEQ ID NO: 471 - DNA, 820 bp, Homo sapiens
  misc_feature (1)...(820): n = A,T,C or G
cnnnnngggnnnngnggcgncntccnaaanccggggcgacagngccnnngttccaacagaccnggngngccgncngngccccanacagcangggnggggcnnnggggnnncnncgncnnncnnancnacaaagaactcaacaagaaaaaaacnaaccccacaagcgggcaaaggacgngaacagacantncccaaaagaagacatacaagcaaccnaaaataatcnaaaataagnnncaaaaagaaaaaangcnagacagagnngnganagnactnagnaaaaagnganatctagcggcnannagnangnnngnnnacggncngnnncnaagaaanagncnctggnncccaagcnggagnacagcggcgcaagcnnggcncactgcaaccgcgaacncccgggctcaagcgaaccnccagcctcagcctcccaagnagcngnnaaaggcangcaccaccacacccgacnaaaatancngcnancaanaacananaanggcnccccngngcnnanncaggaaanaaacacncnnangcnncngaaaanaannaancncncncnnnacaaaaaaacnnnagccnnagaacaannnnggaggcggaanacggnnnancccgacanganaanganacnanngangganganngggaccaaaccncancccgggaanggcnnngnaaaaaaaangccnnnaaanngggggaaaanncggngnangccnaaagggccnnaaanggggaaacccnannaaaangccgggcanannanaaccnagcnnnancnanccnnccaanggggnannnccncnnncnaggccg

SEQ ID NO: 472 - DNA, 738 bp, Homo sapiens
  misc_feature (1)...(738): n = A,T,C or G
gnngtgtctctaatgcttggctactngttctttccgccgaacncttgctaatgcttggcnntcgttctttctccacnnacnnngcnntncgaattcggcacgaggtcacaganatnaaagtccaatcataggggctggnccnacntctntgctnntccctgcangantcatangatcagnnanaccgtgcgnntttgnaagcntttcaaatgtgntaccatcgngttacttncnnnggcacctgntganntnggttgnactnnncnggatnctccaaanccaccnnnncnatgggntnngtgngcatgngntggnncannnacagannnaganactttaangaannngnttntgcaaccntnggnnctagcaancntganantnccagggnnggccacnaagctgaaaatnnatgttanancnnatgntgnaatctctagnatgacttccncannnancnaaactnangcanggctgcnatgttagaanctanaggccnaatttcttntcnatgnaaccantntatgcttttaagaccntcaactgtnncnatgaagcccatntacatnattncggtaatanggctatncttaaannnaactgctgaaaatnatgatncanctacgaaatcctnncanccncatntggctnaatcattaccaaccatttgacaccnncatngnctacccacntgcattnccatgaccnantccantgccacccgcncagatntacctt

SEQ ID NO: 473 - DNA, 752 bp, Homo sapiens
  misc_feature (1)...(752): n = A,T,C or G
tatgnntncctaanagagttntgnnacacggcccgccttctnaaancttcctaatncttgggcgctcgttctntctncacncagnnnntgcggtncgaattcggcacgaggtccttttgaaccaccccaaagaactcaacatggcaaagcaaatggtaaaagcttcccgactgttctactttgggtccgcgcgaagcccactcacgtgtgatctgtgttgcccctgggaggcccggggcgaccggaaaagggctctctcaagttctgaaaagagaatctgccaccagatcgaatttcgacccctgagcttgttcggacgtatggtccaaattcagattaaggtggtcacccaacccgagatgtcaggaaaggccttctgcagagaaaatgtccccccacccgccatctgcagccaggtgtgtgccacacggcagccttcccgaaacatagtatggattttaaaaatgtgtntatttttggttctcaaccactttataacgtattttttaatttattttgtaatgtcttgttttgaagtattgctgctatccttggtatccttcccactggttttatcactganttattttgngaaagttgncactaatgttctatgtcaaaatcaaaagtatttaatgaaatactanntctatttaatgtggntatggaaccagctggaaacacaaaacaaacagtgattgacancaagctgggcccaagagncaggtcattttgnacatatgccaataaac

SEQ ID NO: 474 - DNA, 752 bp, Homo sapiens
  misc_feature (1)...(752): n = A,T,C or G
ttgcanacnnaatanttgctgtaaaagtcccnnctttttnccctttctaatgnttgngcgctcgntctntctccacnagnnnntgcgttncgaattcggntctnagcccatgccgggatcttcccacacccgtcctcacagatccagccccagcccctgtcttcccaggccatctctcagcagcacctgcaggatgcgggcacccgggagtggagccctcagaacgcatccatgtcggagtctctctccatcccagcttccctgaacgacgcggctttggctcagatgaacagtgaggtgcagctcctgactgaaaaggccctgatggagcttgggggtgggaagccgcttccgcacccccgggcgtggttcgtctccttggatggcaggtccaacgctcacgttagacattcatacattgatctccaaagagctggaaggaacggaagtaatgatgccagtttggactctggcgtagatatgaatgaaccaaaatcancccggaagggaangggagatgctttgtctctgcagcagaactacccgnccgtccaagagcaccancagaaagancctcanccccagacagcacggnctacacgcanctcgtgnacctggatgacntggaacanaatggtancnaatgtgggaccacngncttgtancccnaggacaaggccctncnangcttgntggangggtcnantcnganaaatggnggccactgcccaacccgcangaaganaacaann

SEQ ID NO: 475 - DNA, 742 bp, Homo sapiens
  misc_feature (1)...(742): n = A,T,C or G
gntttctnttaatncttttnnaaangcgnnntttaccnttctangnntgngnctcgttctttcccacnnannnnncggtncgaattcggcncgaggtgaaacagaaagtggagatgctttccttgacctgaagaagcctcctgcctccaaatgcccccatcgctatacaaaagaagaactcttggatataaaagaactcccccattccaaacagagccttcatgcctttctgaaaaatatgacagtgatggtgtctgggaccctgagaagtggcatgcctctctctacccagcttcagggcggagctcaccagtggaaagtctgaagaaagagttggatacagaccggccttccctggtgcgcaggatagtagatccacgagagcgtgtgaaagaagatgacttanatgttgttctcagccctcagagacngagctttggagggggctgccacgtgacagccgctgtcagctcccggcgctcangaagtccattagagaaagatagtgatgggcttcgtctgcttggtggacgtaggattggcagtgggaggataatctctgcccggacctttgagaaggatcaccgcttaacgataaggacctgcgggacttgagagacagagaccnananaaggacttcaaggacaacgtttcangananaanttttggagaaagtaancntgtcttttggtgancgtanaaanaaatgattcttacncnnaanaagaacccgaatggtt

SEQ ID NO: 476 - DNA, 1122 bp, Homo sapiens
  misc_feature (1)...(1122): n = A,T,C or G
gnnngggnnnttctaaaagctgggnnnnnnnnngaggnncttctaatncttctaatggttggctctcgttctttctncacgcagcnnngcgnnncgaattcggcacgagcctgcagccactaatgcattgtgtatgataacaaaaactctggtatgacacattttctgngatcattgntaattagtgacatagtaacatctgtagcagctggttagtaaacctcatgtgggggtggggtgggggtgtatncctngnggganggnnnnnnnnnnnnnnnnnnnnnnnnnnnnnnnnnnnnnnnnnnnnnnnannnnnnnnnnnnnnnnnnnnnnnnnnnnnnnnnnnnnnnnnnnnnnnnnnnnnnnnnnnnnnnnnnnnnnnnnnnnnnnnnnnnnnnnnnnnnnnnnnnnnnnnnnnnnnnnnnnnnnnnnnnnnnnnnnnnnnnnnnnnnnnnnnnnnnnnnnnnnnnnnnnnnnnnnnnnnnnnnnnnnnnnnnnnnnnnnnnnnnnnnnnnnnnnnnnnnnnnnnnnnnnnnnnnnnnnnnnnnnnnnnnnnnnnnnnnnnnnnnnnnnnnnnnnnnnnnnnnnnnnnnnnnnnnnnnnnnnnnnnnnnnnnnnnnnnnnnnnnnnnnnnnnnnnnnnnnnnnnnnnnnnnnnnnnnnnnnnnnnnnnnnnnnnnnnnnnnnnnnnnnnnnnnnnnnnnnnnnnnnnnnnnnnnnnnnnnnnnnnnnnnnnnnnnnnnnnnnnnnnnnnnnnnnnnnnnnnnnnnnnnnnnnnnnnnnnnnnnnnnnnnnnnnnnnnnnnnnnnnnnnnnnnnnnnnnnnnnnnnnnnnnnnnnnnnnnnnnnnnnnnnnnnnnnnnnnnnnnnnnnnnnnnnnnnnnnnnnnnnnnnnnnnnnnnnnnnnnnnnnnnnnnnnnnnnnnnnnnnnnnnnnnnnnnnnnnnnnnnnnnnnnnnnnnnnnnnnnnnnnnnnnnnnnnnnnnnnnnnnnnnnnnnnnnnnnnnnnnnnnnnnnnnnnnnnnnnnnnnnnnnnnnnnnnnnnnnnnnnnnnnnnnnnnnnnnnnnnnnnnnnnnnnnnnnnnnnnnnnnnannnnnnnnnnnnnnnnnnnnnnnnnnnnnnc

SEQ ID NO: 477 - DNA, 747 bp, Homo sapiens
  misc_feature (1)...(747): n = A,T,C or G
gnngtgcctttgaaannccntttgnnnnngnggcccttctaatgctnttncgntcgnggggtcgaactcgccccacncngcnaggcgggggctncaagcgattctaaaccacctatgagtatttcttttagggctcacttaaatacatgtntgngnntactgggggctagccngaataattttagatctgatcaggtngnngctnaaattngaaaaanaccnnntngatgcttaaagaattngcntccatttttgagtctaaatcttttaaaatntactgngatccacatctagngaaatgtcngtgtcaanatattctngatnatcgctnaaatccncattaatactcnttnggggtnnnnnatagnggaacttcntagnnntncnaaaagcacatngncttcctgnctccgctgctcccacagnnggtnttgnaactgggnaaatcagnnnnnngatagcgngngnntntnaganaaantngatncacacatncttnnnnctcagncnncacatngattgaacactctggccaagatgctgnggnggatgangttggagttcganngaagaagccngcgctggcctggcttgnaagacccnngnctttcccntnccctcnctngaaagctgcccngacngaggccnaangnaaatggntganngnncngtcnngcccncttcngncncttngaaccnnnnagnggnnctnnnngnacccnnngnnntncgngnaaccgnnccngc

SEQ ID NO: 478 - DNA, 746 bp, Homo sapiens
  misc_feature (1)...(746): n = A,T,C or G
gnnnnnngcgcgnccttctaatgcttcntaattnnctnggatactcgttctttctncaggnatcnnntgcgnttcgcaaggagnagagtgatagnaattggcagtgaaatatacgaaccaccctcctgccctctgggttcacaatacgtgtacacttgactgtgaagtggctgtgagagtgggtggagagttcttctttgaccctcagcctgcggatgcctctagaaacctcgtgttgattgcaggaggagtcggaattaaccctctgctttccatcctgcggcacgcagcagatctcctcagagagcaggcaaacaaaagaaatggatatgagataggaacaataaaactattctacagtgcaaaaaataccagcgaactcctgtttaagaaaaatatccttgatttagtaaatgaatttcctgagaagattgcatgcagtttgcatgttacaaaacagactacacaaatcaatgcggaactcaagccatacatcacggaaggaagaataacggagaaggagataagagatcatatttcaaaagagactttgttctatatttgtggcccacctccaatgacagactttttctccaagcaactggaaaacaaccatgtacccaaagaacacatttgctttgagaagtggtggtaggaggcaagaccaaaggcaggaaaaaattaangaggtgagatctactcaaggagagctcaaaaaaaaaaaaaaaaaactngggccctttaga

SEQ ID NO: 479 - DNA, 750 bp, Homo sapiens
  misc_feature (1)...(750): n = A,T,C or G
gnnnnnnnnnnngngnnnnnttctannnttcntattnnctnggagctcgttctttctncaggatcccntgcgattcgaattcggcacgagggtagactggctagggatcctggacccagggttccacgtagcaacacctgctgagttctctgggttttcttcctgcctcatgtagcccagacttggagctgaagaagctggaaacatggaaacaccaacagctacagaccaaaaaaagtcccaacaaaggcctgtcagtctgccagcctgttctgtggatttccaactcaagattgcagcatcaactcacacctgaagttctggcttccctacaaactttgaacttgccagtccccacaatggcataagccaattccttaaaatgaatgtctagttctagataatgtgtgtattctactggttctgtttctctggagaagcctactaatagatcatttgtcttagtcaattcaagctactggtacagattaccatagactgggtggttaaaactaccaatcttattactcacagtttttggagtctggaaagtctgagatcagggttccagcaggattgagttctttggtgaacatnctctttctggnctacagaatactgggttactttaagtnggaaaaagtagggtgaagctgggtcntttggcctcttcttttaagggggactaattcatgaagggttccacccttattgacctattttaccttnccaaanggnttccattttccn

SEQ ID NO: 480 - DNA, 714 bp, Homo sapiens
  misc_feature (1)...(714): n = A,T,C or G
gnnnnnngnnnngnggnnnttcnaccgttcttntgacctagnctcgntntnnccnacnnagctaggcttgngaattcggcacgagataacacacatcacagtatgctctcagaaatttctttatttgaaccctataccaatatctgntgatcaatgaccatttttgctcagcatggagaaacagtgccctgcatgaagggtagtgagaataaaaaggatcttaccacctttatcatgagggtggctttgctctctccattccaagttgttctctgttctagaaagcagatgtagtagacatctactgtttttgcctaaacagaatccctttttcctttttttgttaaaagtactcatccctaatattacattgttctggaaggactgaaaataacagaactcagcaccatgatcggaccgggacaatcagattatttcattcctcancaaacggagatcgatccgaaaagtggaaatatgagctcttctttggtgttggcatatggaccctgagagaaagaactttaattttttctcttggactgcaataaagtatagctgcctaaaatacgtttcctgaccttggangtttgnccacaatcggtgaaataaangcaagacgtacacttggatgaaaaaaaaannnnnnnnaaaaaaaactcgacctttanactatnngagtcgatacntaatcngactgatagatcattgnta

SEQ ID NO: 481 - DNA, 742 bp, Homo sapiens
  misc_feature (1)...(742): n = A,T,C or G
agccnttctaaangccntttgnctnngnnccccnttcctaanncntggctaatncttggcnactcgttctttctncacgcacccatcgnnncgaattcggcacgaggcatgaaaggagtcggaagcggaagcggtagcccggacggtgctgtggtgcaagggcttgtggaaaaattggagaaaaccaagtccctggcccagcagttgacaagggaggccactcaagcggaaattgaagcagataggtcttatcagcacagtctccgcctcctggattcagtgtctcggcttcagggagtcagtgatcagtcctttcaggtggaagaagcaaagaggatcaaacaaaaagcggattcactctcaagcctggtaaccaggcatatggatgagttcaagcgtacacagaagaatctgggaaactggaaagaagaagcacagcagctcttacagaatggaaaaagtgggagagagaaatcagatcagctgctttcccgtgccaatcttgctaaaagcagancacaagaagcactgagtatgggcaatgccactttttatgaagttgagagcatccttaaaaacctcagagagtttgacctgcaggtggacaacagaaaacagaactgaagaaccatgaagagactctnctacatcaccagaaggttcaganccaatgacaagacccancaagcanaagagccctggggagccctctgctgatcccaaanggcaaaaaatggggccn

SEQ ID NO: 482 - DNA, 752 bp, Homo sapiens
  misc_feature (1)...(752): n = A,T,C or G
gnnngnggagnnttctaatgctttgntctagagtcncnnttctaanggcttggnaatnctngctcttgttctttntgcaggatcccatcgattcgaattcggcacgaggccaagcctcggcctccactgcacctgctgcggagtggcacctttgcctgcaaggccctctaccccatggcccagtgtcatctcagcagggtctttggccactcaggaggcccttgtggtgggttgctcagtctgtccttccctcatgagaagctactgcttatgtccacagaccaggaggagctgtcacgctggtaccacagtctgacttgggctatcagcagccagaaaaactagaggaatcttatagattccagaactcaggatacctcagggataggtcacagccaagagtacaaaggaatcttcagtactgaacaaaacagaacccttcatgatttgacaaaggtcactttctgtttgcctggaccaagctactccagatcatctgaccaactcttaaaaatcacggccaggcacagtggctcatgcctgtaatcccagcactttgggaagcaaangtggcaggatcattccagcccaggagtttcaagancagcctggcaacacagtgagtgagaccctgtctctatttaagaaaaaaattattaagaaattttattaaaaaaggaagaatcaggaaaccaaagtcaaccccaacttaaccctcaatgaaccagccctaacacagatgangggatttg

SEQ ID NO: 483 - DNA, 849 bp, Homo sapiens
  misc_feature (1)...(849): n = A,T,C or G
gnnnnnattnccctttnaaatnccncngaaancccttggaagcactaccnctcngacccctttggaacgncgactnctnnatatatcnnggatataataggtgataagttctgncaattagtaacatcnggaaaaaacagctnngncctgggngaaaaaggatgccaaaatngcctggaaaagagcagnggagaggagtccgggagatgngngatgcatcgggacgcancatngntnaacattcactgggtctgccaaaaatgtggatttgngggctgcttagatngttacaaggcaaaaggaaaggaaagagttctagagataaaagaactatatgcttggatgaagtgtgtgaagggacagcctcatgatcaccaacatttaatgcccaacccaaaattataccnggttctgntttgacagacttctagatgccatgcacactcttagggaaaaaatattgggattaaancccatnggcattggactaacaaacaggaatttacaaggtnggaaanttttncnaccaatgaaaggggggatcncaaggttttccagaanggntcntaatcncaggnaataaaaattnctctngggcaagccctgagtcttaancagcaaaaanactcctcccgaancctgnagaaaaaagggggggcagccaggcccnnaaanggaangtnaggcccnagatnaacaangtnacctccncccagnaaaccccannccccaactggnaccngggnaacccacaacntttgcngaagnccaaaaaagnccnnnaganggaaaaaaaaaaanaananaaaaaacctnnnagcccctaagaaaccttaggggnggcccncc

SEQ ID NO: 484 - DNA, 1098 bp, Homo sapiens
  misc_feature (1)...(1098): n = A,T,C or G
gnnnnnnnntttnnnnntttttgnaaaancccccttttgcnaaatngnccctttttntggcangggatccccatntttatntcggacattttcgggccaccggaaggggccgggggcccccgggccnccaggnccgggnaaaggccccccttgggcggcccccggncggccccaatgggttccaaaaagggaaaaaaaaaaaagggggaacctgggaagttggcccangaaaangnaaaaaaaggnaagnaaaccttccgccaatgggaatggggaaaaataattttttcttgaaaaacccaaaaaaggaatggttatttttcaaatttaaaaaaggaacnttgggaagaaagaattggcttcccacncgcagaaagggcattactggctatgtcaagtaaaagaagtccttcaaagcttagttgatgatggtatggttgactgtgagaggatcggaacttctaattattattgggcttttccaagtaaagctcttcatgcaagggaaacataagttggaggttctggaatctcaagttgtctgagggaagtcaaaagcatgcaagcctacagaaaagcatttgagaaagctaaaattggccgatgttgaaacggaagagcgaaccaaggctntgcaaaaagagcttttctttcactttcgagaccaaaggggaaccagctnnaagggcnagaaaagttngaaaaaaattccaaaggaactggtggaatcccccaaaaggtttggttggggaaagaaaaattcccgccccaangccaaaatttaaaaggtttngcccccaaagggaaaagncttgncctttaacccaggaattggggaccctggganttaaaaccnataattttcccgccnaattnnaaaaaattcntttnggggnccccnaaaanggnaaaaaaattttnggggggttttggnaaggnaaaaatttnaaatttggatttngaaacttttttngggaattccccagaaagaacttttgaccttccnttngacctnaaaaattttcccttgggggggtgnaanggatgttcccaagctttgtggnatattggtaaaattttnaaccttttntncttacc

SEQ ID NO: 485 - DNA, 798 bp, Homo sapiens
  misc_feature (1)...(798): n = A,T,C or G
gnnnnnnantnnnntttnaaatccttnntgaatcctttgaantaccatcccnttttncgaattnggcacgaggaaaggtggcgcgcttctcacggctgagttgctgcgccttgcagacggaagctccccacaggcagagctgcttggatgtgtgagtcatgaaccagagaagccccgctccatgagcagtgactccccangccctgtgacctccctcctncttgcagctcctcctggcaccagtccccagggctctcctgttggtagttcctgcttttcttcttggaaattcctcgtggacctcgagatctttaccctaaaatagttctgttgaatttcaccctggcaatgtaaattgatagcttatcttcacagatgccagacaatggacaactcaccatcagtcctctgctcacctgagacaaatgcatgtctgattgcttcctctgccctattgnttatgtgaaaatgcagattcactgagccagactaaggcatcagtgactgttcctctacctgcctctcacatggagattgtgtattcagtgaaaggctgatcaaagacccaaaggaatgcaacagtttatctcttatctacctatgacctgcgaactggccaacaacccagttgttgncgccttttcagacagaaccagtgtcatcttacacgtattnaaatggatgtcctggngtctncctaatatgtattcaaaagcaagctggggcctngaccacccttnggcacatattcctcanggacatcattcctgangctgtgtcactggcatgtccttaanc

SEQ ID NO: 486 - DNA, 785 bp, Homo sapiens
  misc_feature (1)...(785): n = A,T,C or G
gnnnnnntttgaaanccctttcnaatncttggcattgntctctttgcaggatccctcgattcgctgacaacttgattgggttctccttcaggtttgaagcgccctcgagaagtgtctaaaggagacagttgatagccaaacaacagttttggattcactgactgattatgaaagaagcagtagactggtatcaagaatcagtcagcaaggaggccctcaccagacgccagtgccatgttcttggacttctcagcctccatattcatgaactaagtttttggaatccttaggcttccacgtgtggaaagcctgagctaacctactggaggatgagccatcacctggagcagattcaggccatcctagttgaagcctccctaggccaagcaaccgtccaactaccagacattgaccattcagccttgaacattcagcacaaagacaaaacagaccagaccagaagagtcccacagaataggggaaactattcagagaaaacttaagccactaagttttatggtgttttgttctgtagcagaagcataggcatactgacaatacaaaccgaaatccttctaacgtagtggaccttttcangccagcattttttccttgaaaacctggagcatgtatccatcttatagcagagatcactttcacaatggttgggctcttggatttgaattgatgatgtaatgagccctctttncngattgnaacttaattactctgggnatttgntggattcccaaccttctaatatttacttttcctctttantaanc

SEQ ID NO: 487 - DNA, 797 bp, Homo sapiens
  misc_feature (1)...(797): n = A,T,C or G
ttgtnnnncccttttnaaatncctttggctanttgntctntttgctngatcccatcgattcgaattcggcacgagnnnggactaccttncaaaaccnggtngggaagcntgttacagaantgatntctantcccctgnattctggatgctgcagaccaacacctgccnacaanacncanacacacacanncaancantatcatgtaagacagnncgntnantnnnnnattntnatncttnnncatttacncantnttgtanantggntcatgngtctatanatnnttgtaantattntntgananangacganantctgaatcttaagcatatgctccatcnttnnatatgctntggtggagaggctngccntnattcatnttnncatggagncaagtttaatgcctctagantacattctgggcttcaagcatncttatttnnaactccctgagtgatgggtggataaatcnaacattgnctnagtggnntcaagacaactttgntggtggttttgntcacaatcatgaaaatggttnngccagataaatattttgatattagntttcntttttnatatanngcggtaggtttgaattgnacnttnaaatgnntngggttgtnaagacantggnttncaatnnaatttatnacatgaattggngnctcccctttggngaaaccttaaagaanttntgnatacttcttcataaaagggtgtgngatttngnaantttcgggggttttnaatttttnntgaagcttatttcntganaatntacttggnttaccaagcc

SEQ ID NO: 488 - DNA, 762 bp, Homo sapiens
  misc_feature (1)...(762): n = A,T,C or G
caaatcnnttgctctngttctttttgcaggatcccatcgattcgcgacagctctccaatactcaggttaatgctgaaaaatcatccaagacagttattgcaagagtttaatttttgaaaactggctactgctctgtgtttacagacgtgtgcagttgtaggcatgtagctacaggacatttntannggcccaggatcgttttttcccagggcaagcagaagagaaaatgttgtatatgtcttttacccggcacattccccttgcctaaatacaagggctggagtctgcacgggacctattagagtattttccacaatgatgatgatttcagcagggatgacgtcatcatcacattcagggctattttttccccacaaacccaagggcaggggccactcttagctaaatccctccccgtgactgcaatagaaccctctggggagctcaggaaggggtgtgctgagttctataatataagctgccatatattttgtagacaagtatggctcctccgtatctccctcttccctaggagaggagtgtgaagcaaggagcttagataagacaccccctcaaacccattccctcttcaggagacctacccttcacaggcacangtcccccaaatgagaagtctgntacccctcatttcttnatctttttacttaaactcaagaggcagtgacaggnagtcaggggcaagacattacatttttcatactttcccacatctgaaaagatgacaggggaaactgcaaagcc

SEQ ID NO: 489 - DNA, 822 bp, Homo sapiens
  misc_feature (1)...(822): n = A,T,C or G
ttnnnnnnctnnnggnntttcnaatncttgtttctcgncctttctgcaggatcccatcgattcgaattcggcacgaggattttcgaaactcttcagctacttgcccttttttatctgaaaccatcataccttctgaaagaaaaaagcatatcttcattgacataacagaagtgagatggcccagtcttgatacagatggtaccatcntntatatggagagtggcattgtgaagataacatctttagatggtcatgcatacctctgcctgcccagatctcagcatgaatttacagtacattttttgtgtaaagttagccagaagtcagactcatctgcagtgttgtcagaaacaaataataaagccccaaaagataaactagttgaaaaaactggcaaaatctgtatacgtggaaatttaccangacagagactgaagaataaagaaaatgagtttcattgccagatcatgaaatccaaagaaactttaaagaagatgagttgtgtaaatggaactgaagggagggaagagctgccttcgcctggtacaaagcacacatgtgtatacacatgggtcaagcagtgctggtctgtggctgcctgtccagaggaatgggaaatattcctttgtctttagcacttcatttttctaaataaaaatcanccaatatgtctaaaaaaaaantttnttnataataaacctngaagccctnttanaaccttntnntggaggtcctnntttaccntatgattcccggaacttggataaggaatcccntttggattgganattttgggccnaaaacccncnanncttggaatcc

SEQ ID NO: 490 - DNA, 789 bp, Homo sapiens
  misc_feature (1)...(789): n = A,T,C or G
ntgtaanccttttcaaatcccttggctacttgntctttctgcaggatcccatcgattcgaattcggcacgaggccggacngtgactctggnnacgcttgcgnccntnacgtagntngnngaccntgcanganggaanaanggctggccnncngntgtacnctnaccgtcctaaccccgcgaggtccaggnccgctcctttcggngnggattctcgcggaanatccctccggcagctctttgcaaagctgnttagaaacttctcccaaactcggcntggatacgactgctatagggctcgctgctgcttttgtggagctcttgctcctctatccttggcctctcctgggatacggcccaaggccaagtnttcacgcangttggtacgcttatttcgttctggactctgggggctntgaannttcaccacgtggactgctggggancgggntnccgancactngnntaccttacnccanaatctgacaacttttctggacaacctacccancttcaattggctngngagcncntcngntgctggggnntncngtgcaaatggagncncaattggtgggcaaatngttgatggncaaaacgggaaaaagcaacnnncaangcttttggctnaaagccgatangacncaaattanttnctttggaccttganaatttcctcaannnttttnagnanncncttttttncttgganaaanacttaaaagtgaacgattnttgggaaanaaacaaactataataactnaaagcttttntaaaaaaaaannaatnnt

SEQ ID NO: 491 - DNA, 790 bp, Homo sapiens
  misc_feature (1)...(790): n = A,T,C or G
tccaaaatncccttggantnattcccccttncaatacctttccttngnacactcccngtttngntngatcccatcgattcgaattcggcacgaggnaacaaagaaggaatgtcttcctcatgtttnggtctatagaagacgttaaagaaaacttccagaaagtgggtttgaggcatgagccaccacgcctggccaaaggatttaatgaattaatggatgtacagtgctggggctgttattctagggcctgcattgagactcacattttgccatcaaaagccttttaagaggtggaggttgcggtgagctgacatggtgccactgcactccggcctgagtgacagagtgagactctgtctcacaaaaaaaataatgccctttaaataatgaataatagtgatagaaaatgtcatttcttggacaaatgaaaaattgaaattaatgtatataattagatattattagctactcttaggtagcttcatttgttgaaagtttgacaagtgaatgaagttcacatctggaaatcgttgaacatttttcgttcatggaactcaatggctacgttagtcgtttatgcttttcactgttgtggtaggggctttggaaagtnaatgccatcaacaatggatacagaangacctggatttggaataagggcaaaaatttattttgatggggctgaattgctctgccagggagcattttgggtattgagatgaaaatggcctctctttgagactgagctgccacctggcaaattattgnctgcttaanggttctctttatn

SEQ ID NO: 492 - DNA, 804 bp, Homo sapiens
  misc_feature (1)...(804): n = A,T,C or G
tcnaaatcccttttgnnagnttcncnctttgtttccctttnctnggctncttgttctttttgcaggaatcccatcgattcgaattcggcacgaggtccttttgaaccaccccaaagaactcaacatggcaaagcaaatggtaaaagcttcccgactgttctactttgggtccgcgcgaagcccactcacgtgtgatctgtgttgcccctgggaggcccggggcgaccggaaaagggctctctcaagttctgaaaagagaatctgccaccagatcgaatttcgacccctgagcttgttcggacgtatggtccaaattcagattaaggtggtcacccaacccgagatgtcaggaaaggccttctgcagagaaaatgtccccccacccgccatctgcagccaggtgtgtgccacacggcagccttcccgaaacatagtatggattttaaaaatgtgtttatttttgtttctcaaccactttataacgtattttttaatttattttgtaatgtcttgttttgaagtattgctgctatccttgntatccttcccactgtttttatcactgatttattttgtgaaaagttgtacactaatgttctatgtcaaaatcaaaaagtatttaatgaaatactagttctatttaatgtgggntatggaaccancttggaaacacaaaacaaacaggggattgtacaagcangcttggggcccaagnaaggtcaaggttcatttggttaccatatgccnataaaacctcancgaanttttaaaaaaaaaannnnnnnnaaaaaancttggngggct

SEQ ID NO: 493 - DNA, 800 bp, Homo sapiens
  misc_feature (1)...(800): n = A,T,C or G
ggnncnntttnccccccttttgaaaaccccttttgggngaancccncttctttnaaatcncttggctactcgctctttntgcaggatcccatcgattcgaattcggcacgagtatataacaacttttgctttcaaagttgggtgggactagaacacacaatggaaggatggagtcaggagacctggattcttgtgcccgctctggcttttacagtctgcctaactctatgcagtcacttcctgccagcctgtttccttacctacaagagggagagacactccctggccagcctagttctcagggtgaacgaaaggtcattatcactgcatcctctagtcatttgcttcttcgctaattaacacatcttgagcacctgcgatgttccaggaacaggagatggcagcgtgcaagataaaagtccctgacttctagagactgcatgttagtggcaatcggcgtctacccggccttcaataaactactgaatgaaggaaaattctacctagcaccagacacaattactgggtttctaaaatggaattattcccccggccccctgcatccagcagcctgctgcagggaagctcctccgaagctgtaggcaggagcgggacaaatgcttgctatcagcttcacagaatgttacctaagtactattcctacacagcgccttacagaacaaacagtaaaaaccaaatggnaagcatgcacnggcttaaaaactcaaacttcctaactactcagtaattanganggtcattttaccccaaaatagaattttcnatttatccaataanaa

SEQ ID NO: 494 - DNA, 757 bp, Homo sapiens
  misc_feature (1)...(757): n = A,T,C or G
nggnttcnntctaactnaaacngttnggnaactcncctctntctgtngatcccatcgattcgctaacaagcgattctaaaccacctatgagtatttcttttagggctcacttaaatacatgtttgtatatactgtattctagccagaataattttagatctgatcaggtagtagctaaaattagaaaaaaacaaaatagatgcttaaagaatttgcatccatttttgagtctaaatcttttaaaatatactgagatccacatctagtgaaatgtcagtgtcaaaatattatagattatagctaaaatccagattaatactcatttggggttttttatagtggaacttcatagtaatacaaaaagcagattgtcttcctgtctccgctgctcccacagtaggtattgaaactggtaaaatcagttttttgatagtgtgtgtatataagaaaaaatagatacacacattcttttttctcagtcaacacattgattgaacactctggcaaagatgctgtggtggatgangttggagttcgaaaagaagaagcaagcgctggcctgccttgaaagaacccgaaagtctttcccattcacttctctagaaagctgccaagacagangcagaaaggaaatggatgatagttctgtcaagcacacttctgntctcntagaacttagaaatggttctaagagaacagaagttatngagaacagttcntgtggaattcaacatcttgggtgggacncattggcttt

SEQ ID NO: 495 - DNA, 756 bp, Homo sapiens
  misc_feature (1)...(756): n = A,T,C or G
ggnnnnnntcttttcnaatgcttggctctcgttctttntgcaggatccctcgattcgcaagagagagtgatagaattggcagtgaaatatacgaaccaccctcctgccctctgggttcacaatacgtgtacacttgactgtgaagtggctgtgagagtgggtggagagttcttctttgaccctcagcctgcggatgcctctagaaacctcgtgttgattgcaggaggagtcggaattaaccctctgctttccatcctgcggcacgcagcagatctcctcagagagcaggcaaacaaaagaaatggatatgagataggaacaataaaactattctacagtgcaaaaaataccagcgaactcctgtttaagaaaaatatccttgatttagtaaatgaatttcctgagaagattgcatgcagtttgcatgttacaaaacagactacacaaatcaatgcggaactcaagccatacatnacggaaggaagaataacggagaaggagataagagatcatatttcaaaagagactttgttctatatttgtggccaccttcaatgacagactttttctccaagcaactggaaaacaaccatgtcccaaagaacacatttgctttgagaagtggtggtaggaggcagacaaaggcagaaaaaattaagaggtgagatctactcaggagagctcaaaannaaaaaaaaaaaaactnggacctntagaactatagtgagtcgtnttccgtagatccagacatgataa

SEQ ID NO: 496 - DNA, 744 bp, Homo sapiens
  misc_feature (1)...(744): n = A,T,C or G
ctttnaatcccttgcactcgtcttntgnaggaccttatcgattcgaattcggcacgagataacacacatcacagtatgctctcagaaatttctttatttgaaccctataccaatatctgttgatcaatgaccatttttgctcagcatggagaaacagtgccctgcatgaagggtagtgagaataaaaaggatcttaccacctttatcatgagggtggctttgctctctccattccaagttgttctctgttctagaaagcagatgtagtagacatctactgtttttgcctaaacagaatccctttttcctttttttgttaaaagtactcatccctaatattacattgttctggaaggactgaaaataacagaactcagcaccatgatcggaccgggacaatcagattatttcattcctcagcaaacggagatcgatccgaaaagtggaaatatgagctcttctttggtgttggcatatggaccctgagagaaagaactttaattttttctcttggactgcaataaagtatagctgcctaaaataccgtttcctgacacttggaggtttgccacaatcggtgaaataaaggcaagacgtaacactggatgaaaaaaaaaaannnnnnnaaaaaaactcgagcctntagaactatgtgatcgattcgtagatccagaatgatagatcattgtgagtttggacaaccacactngatgcagtgaaaaaatcttattgngaattgngatn

SEQ ID NO: 497 - DNA, 772 bp, Homo sapiens
  misc_feature (1)...(772): n = A,T,C or G
gnttgnngtntaantttntaaggatccctttntntgaanccctttctgcaggatcccatcgattcgaattcggcacgaggcaggagnaatcacttgaaccctggaggttncggttgcagtgagcacagatcatgccactgcactccagcctgggcaacaaaacgagacttcgtctcaaaaaaaaaaaacatagaatttggatcctttggtcgggttctcccaaattcttttgaggtgtccatggtcaactgcttcagctttgttttggcaaccccctgcccgaagtcgcatataggctgttcttcaccttgtttccaaggctgaggaacagaaagtagcctctgttttgaggaggtggaagttaagtatacatttattttttactgtgacttgttcaggaccacattttacaaaatgccttgtttccttcattgtttctggaaaggaaagttctattaatattgntttactttgaatatagaatagtttttttaattagggcttattttgaaaaattctgagtttaattcaaatgtatgccaataccttccaaagtaaggtaatattcagagacagttgttggtgatcagatggcttagagaaaatttctggaatattcacattcgaagatccttattatgaatgtctttgacttaaatctaaccaaaaactgcacattattctttgnacattttcattatatagngttaacaagcttanttgcaaaccaataaatacttaagctatttaaaaaaaaaaaaaaaaaactcnc

SEQ ID NO: 498 - DNA, 773 bp, Homo sapiens
  misc_feature (1)...(773): n = A,T,C or G
nttnagcntannagccgttgtantgaagcccntttgctacttgctctttttgcaggatcccatcgattcgaattcggcacgaggacccaggtagaccagctcaagagttcatgttctttgtcatcctcctgtgagctctctgtaagtctctntcttgcccatcaccacatccctagtactgggtatcagtctggccacttggctttctggtttgccccaatgtggtctattcttgatgcagctaccaaagtaatgttntaaaaccattataccaagttactatccttgtcaaaacccccagtaactgccaatctcacttagaataaaatccggactcctgtgaagcacagnataaactggcactgcctatgcagcaacctcatctttaccgtttctgccttgctcactcccttcagcgccggtattcttcctgatgcccctagtacacaacaactccttcctgctccaagagtaggaaaatnactgtctctctgccagtgagattcctcttctggtattacctntgcttcattgctgaatcttctgcaatatcatcttctaaaaagagcctttnaaaatcaccttttctattatgccctactcantttccagtccctgaatggccattccccactttcatagccacttaattgctatctgaaattacacttaaaatggtcaccttcatgatgggaaggcaattaattgcctttgtcactggtatgtctagagaacaagcagnttggctcatagtaggcactcaacaaaaattt

SEQ ID NO: 499 - DNA, 735 bp, Homo sapiens
  misc_feature (1)...(735): n = A,T,C or G
gcttcaatanctttttctaangctctttttgcaggattccatcgattcgaattcggcacgagagtacccananttgcnaggagtntnntnactgatntagccaggtggcaatnatgagtgaatggatnaanaaaggccccttagaatggcaagatnncatttacnnagaggtccnagtgncanccagtgacangaatgagtttnaagggatgggttttaactacagacccagnctctgccaatatngaccttgtgaacttccttgaagatggcancatgtctgagaccggaattatgggacatgctgtgcagactgttgaaactntgaatgaaggggaccatagagtgagggataagctgatgcattttgttcacgtctggagactgcaaagcatacagcccacaggatctggaagagagaaagaacagcctanagnaaatggctngagangaaccacattcccatcactgaacaggganacgcttcaaggactctctgtgtggctggggncctgactatngacccaccatatggtcananaaattncaccagctctnatgagantattntgtcgcgtgttcaggatcttantgaaggacatcttacantttnccaannanaagncatgaaatgtgacattctgcttgaanaagacnatattttatcctcatnaatgtttaaatgtaaaannnnananaaaanactcgagctntnaaatntngtgagttnanang

SEQ ID NO: 500 - DNA, 926 bp, Homo sapiens
  misc_feature (1)...(926): n = A,T,C or G
tttaagccctttctactnctcttttgcaggattccatcgnttcgaattcggcacgaggatctctatactagtgaacagtgccagttccacactttggacttagaactgttctctagttattgtaacacagaatactgtcaatccctaatttacttaatgttacttattggaagtggggctgatgaaatacgcacaggagggaaatctactgtgtttaggcacaggcagncccagtgtataaggagatcatattccaaanggttgtcagttggntgtttgcaacctggaatgtattttcctttagagaccangttatccatggtggttaggcccctagagcagctggaaaaagatgatcaaaccaataggttngctgacatcnaataatgtaataagtttgctaaaggaatctaccatcaaatntnatattgnttccagggaaggttgtnnnttaanntnccntcttngtgncatantggacnntcccntnccagtcatntncntnannnctngggcnngtntngnnttngtntntttngncnnctnancaatatttcatatcncccctngctaaaattctttnanannaanttctcantttctccctttactanaantttngtntttnntccntttantatttnnncctatntntntcgttcnnanatntcattnnntnnttntnngctnntnnatcacccttanctcnntctcanntatcntnntcntattatctctntattnntcncttntnatnatcnttccnnnttgtntanncnattatntcttgttnntntnctcncatctctntcntnttctcngctnannnnactccnnnnntcncnctcntnnnnanatncatatnctnctttngntatatannnnnntntntacntanctcnnnatnncatnncnatatnnttngt

SEQ ID NO: 501 - DNA, 706 bp, Homo sapiens
  misc_feature (1)...(706): n = A,T,C or G
naatncttggctcttgttctttntgcaggatcccatcgattcgaattcggcacgagaatgcaaagggctgcagttctcattcaggctactttcaggatgcacagaacatatattacatttcagacttggaaacatgcttcaattctaattcagcaacattatcgaacatatagagctgcaaaattgcaaagagaaaattatatcagacaatggcattctgctgtggttattcaggctgcatataaaggaatgaaagcaagacaacttttaagggaaaaacacaaagcttctattgtaatacaaggcacctacagaatgtataggcagtattgtttctaccaaaagcttcagtgggctacaaaaatcatacaagaaaaatatagagcaaataaaaagaaacagaaagtatttcaacacaatgaacttaagaaagagacttgtgttcaggcaggttttcaggacatgaacataaaaaaacagattcaggaacagcaccaggctgccattattattcagaagcattgtaaagcctttaaaataaggaagcattatctccacattagagcacagtagtttctattcaaagaagatacagaaaactaactgcagtgcgtcccaagcagttatttgtatcagtcttattacagagctttaagtccaaagatatcaaatatgcacgggctgcacactaatcagtcttctatca

SEQ ID NO: 502 - DNA, 784 bp, Homo sapiens
  misc_feature (1)...(784): n = A,T,C or G
ttnntttttttggttaccctttgctctnggnctttttgcaggatccctcgattcgaattcggcacgagccttccacggttatttcacagatatggagagctggaagcagggagtgagtctctgagtgttggaattgtaagggatcagaagcagggatcagaagcagtggtgaagttcatccaccataaaacacacaggtgactttgccttgaatctgcaggactgaagccaactcttgggcacagacccttagtcccttccttggccactctaagtcagatagtccagagccaggccctttgggatgtgacaccgagataaatcagagaaaagctgtgaagcttggggaacagagggacttttggtgaagtaggtggtctgcagtttctatcttcttgggaaaagcaagctggaaaagtgaacagtggttggtaggccatagtgctcccagctgggtgacataatgaccacacagcacagtgatgttattagcaactgtgtggtggagtagttgtgggctggacaaatcaatcgtgtggaaattgttaggagttttattacattaaacttgttaacctaaaataccatcaaaaaaaaaaantncnnannnnccncccaccnancntncnaaaaaaancctcgancctttaaaaacnnntngnngaggccntatttacgttanattccagacnttgaatanggatnccatttgnattgaaantttngggccaaacccccaaccttngaattgccattngaaaaaaaaatgccttttattttgnnt

SEQ ID NO: 503 - DNA, 764 bp, Homo sapiens
  misc_feature (1)...(764): n = A,T,C or G
ttnntnttccttgaancctttttctacanncncctttgcagatcccncgttcgaattcggcacgagagacaaagaaaaggtggcaatcatagaagagtttntagtaggttatgaaacctctctaaaaagctgccggttatttaaccccaatgatgatggaaaggaggaaccaccaaccacattactttgggtccagtactacttggcacaacattatgacaaaattggtcagccatctattgctttggagtacataaatactgctattgaaagtacacctacattaatagaactctttctcgtgaaagctaaaatctataagcatgctggaaatattaaagaagctgcaaggtggatggatgaggcccaggccttggacacagcagacagatttatcaactccaaatgtgcaaaatacatgctaaaagccaacctgattaaagaagctgaagaaatgtgctcaaagtttacaagggaaggaacatcagcggtagagaatttgaatgaaatgcagtgcatgtggttccaaacagaatgtgcccaggcttataaagcaatgaattaaatttggtgaagcacttaagaaatgtcattgagattgagagacttttataggaaatcactgatgacccagtttgactttcatacatactgtatganggaanattacccttagnatcttatggtgggactttatttaaaaacttncannaatgttcnttcgacagccttccattttaacttcnaaggcnncaangaattnt

SEQ ID NO: 504 - DNA, 795 bp, Homo sapiens
  misc_feature (1)...(795): n = A,T,C or G
ttgtacntctttttnnaaacccntngctacttgttctctttgcanggatccctcgattcgggaatctcctagaaagttgtgattttcgagccatatccttctgtggtagatcctaatgatcctcagatgttggccttcaaccccaggaaaaagaactatgatcgagtaatgaaagcactggatagcataacttctatcagagaaatgacacaagcaccatatctggaaatcaagaagcaaatggataaacaggacccccttgctcatcccttactgcaatgggttatatcaagtaatagatcacatattgtgaaactgccagttaacaggcaattgaagtttatgcatactccacatcagttccttcttctcagcagtccaccagccaaagaatccaattttagagctgctaaaaaactctttggaagcacctttgcatttcatggctcacacattgaaaactggcactcctcctgangaatggtctggtngttgcttctaatacacgattgcagctncatggngcaatgtatggaagtggaatctatcttagtccaatgtcaagcntatcattttgnttactcagggatgaaccangaaacagaaaggtntcagcccaggacgagccaccttcaagcngttaanaagccagcaattacattcacagtcnccaggaaanaaaaggncagncctatcccccctttncctggcaaaaggcccgtnaaccttaaanaaactgcctttagccctttatnntggaaagtggattcncncttnattcttggacccctgncn

SEQ ID NO: 505 - DNA, 774 bp, Homo sapiens
  misc_feature (1)...(774): n = A,T,C or G
tnntntnnttnantngaaccctttnctcttgctctttttgcaggatccctcgattcgaattcggcacgagcacaaggagaagaagttaattaacattgaangatgagaagacatcttggaagaacttgaattgggccttggaagaagaacagccattcaaatagatagaattgtggtagcaaaggcatagaggtaggaaagtatagatctccagggacagtagtcatggggttggggcactgttggaatttaaggttggaaggatatattggagccccttgaatacggtaacaaggcacaccttgggcagtggagagttatcagagtgtttgaaaaggagggttattgagtaaataaatagactggtactttaggaattttaaaatgtggatcattgtactactaataactatttattttatatttactatctactaagtaatttacatgtattttcttgtactgactgtaaaccttctgggtgtgggtgttttaagtgccattttactgatnaagaaactgaggcttaaatagttgaaataagtcaccctgttagtgagtggccagaatgacaagtcagatctanggtttgtctaactnccaaagatnatataaaaataatggatctctccttttcccttatgcataaaatatggggagcntttttaaatcattacccatncgattgnccaaaaaaatacctttngggaaaactgattattantattccanaataaatttcaacggcctgcntngnctnctttacaactttnt

SEQ ID NO: 506 - DNA, 796 bp, Homo sapiens
  misc_feature (1)...(796): n = A,T,C or G
gccnccccnntttngntctcaacttgtaccctttttgcannancncgnnctncttgcaggntcccatcgattcgaattcgccacgangttatattaaattattctttgtttttctttttcttttaataaagcctgcaagttactaaattgtagtttcataaattctgtagtaaagtatcatcttggcagtgtgccaaaggtgaaaatgatgctttctctaacagagaaattcttagtgactccagtcgtagaaaaacgtctttacaacctgaataagattgaagaattgtgaacataccatggcctattggatgaatcatttgccgtaggctaaatcagactgtagggtttgtgatggatttatggagtatgtgggtatagaaatcatgaatctagcatttgttttcagagattcaagcatagtcttaagggtanatcagaaatgacaaatgaattcaaaacctagcaggtgcattgtnaatgtgtgcccagttntgttttggaaatggcagttccttggggtcatgtttctactggcaaaatttgcaatantgtnctattgtntgtaatttcaaaatttataagattatcccccgttcgcccaagtaaaacctgtnctgcccaatanaatcctggantcgnngagaaatcgcntccattcgnngntcaactcgggatncntcgncttaanaaaatnttntccngganccccntcatnangaanaacaccanactattnngggnacctgnaangctcaatngcccnngccncnnangncnnttttccnggnaannn

SEQ ID NO: 507 - DNA, 774 bp, Homo sapiens
  misc_feature (1)...(774): n = A,T,C or G
ctnntttnttttngaanccttngctcttgttctttttgcggatcccatcgattcgtgaagaggagacggtgacctgggctccttatgtgcctgaaagagtttgagtttcctgttaactccaaatcaacagtattttcaacaagaaatgtgcaattgaaatcaagtgctgtttaagtgcagctaggatttccacaggaagacacttgcagtgaacagagttatggagcagcaaaaacacagatctatttggaaaaagagaaaacatatgcgttgtattttgcttcaattataaaataccatcctctcaaaggtggttctaaattacaaaggactttgatttctaggtagattctgggtagagacttcctttcatattgaggcattaatgacaccttttaacctgggaagcaatatgactggagttgtactttgagaagattaatcaggtttggttgcagaatgaaagagaagatgaagtcaagagattggtttagaggctctagcagaagcttagtcatatttcaaaatgatcaaatatcaagaaaaattctgagctgcataacttgtataaagtaattttcagtgattttttcatggttatgatnaaagaactggatttanccagaaacctttacctggattcaagatttaatttttcctttgagcctcatccttaaaggattttcgggaaaacattaaggggagccaaanccnattggntggttgggcntgccctnnaattgcctttggacttttttaaccgggcttttgnnn

SEQ ID NO: 508 - DNA, 724 bp, Homo sapiens
  misc_feature (1)...(724): n = A,T,C or G
cttgcctttgaaaancgttggctactngttctttttgcaggatcccatcgattcgaattcggcacgaggcggcgctgacccggccggccccacacccgctcttcctcttctttgccgcggactccctttcctgcctccaagacctggtgtctcccactgtgagcccagctgtcccacaggcagtccccatggacctagactcaccttccccttgcctctatgaacctctgctgggcccagcccctgtcccagctcccgacctgcacttcctgctggactcaggcctccagctccctgcccagcgagcggcctcagccaccgcctcccctttcttccgggccctgctgtcaggcagctttgcagaagcccagatggacctggtgcccctgcgaggtctgtcgcctggtgcagcctggcctgtcctgcatcatttgcatggttgtcgggggtgtggggctgnnntggggcccgtgcccacaccangcnancccctgtatgggatcanaggcncgaagangcantgnangctgntggcanntnaantactgnctgggctggaanangaactnntaaaagtcntngcccnnatccaccttggnacccnannttnnnccnntantcnnngggntnangtggtnnnnnctngggacagntcnntntggnntgncnatngnncnnatgnanacttggggttcannaancntttccnnatgnaancngngtc

SEQ ID NO: 509 - DNA, 803 bp, Homo sapiens
  misc_feature (1)...(803): n = A,T,C or G
tnnnnntttatttcnttcgttctngnttttattacatcagctcttttctttttgcggtccctcgttcgcaattcagagacacacataagaaactggaagaagagaaaggcaaaaaggaaaaagaaagacaggaaattgagaaagaacggagagaaagagagagggagcgtgaaagggaacgagaaaggcgagaacgggaacgagaaagggaaagagaacgtgaacgagaaaaggagaaagaacgggagcgggaacgagaacgggatagggaccgtgaccggacaaaagaagagaccgagatcgggatcgagagagagatcgtgaccgggatagagaaaggagctcagatcgtaataaggatcgcagtcgatcaagagaaaaaagcagagatcgtgaaagggaacgagagcgggaaagagagagagagagagaaccgagagcgagaacgagaacgggagccgagagagagagcgagagagggaaccgggagcgagaaagagaaaaagacaaaaaacgggacccgagaagaagatgaagaagatgcatacgaaccgaaaaaaaaaaaaaaaaaactcgagcctnttaactatagtgagtcgtattacgtagatccagacatgataagatacattgntgagtttggacaacccccacttgaatgcagtgaaaaaaatgctttntttgtgaaattttgngatgctnttgctttttttgtaaccatttttagcttgcaataaacaagtttnccaccaaccanttgcnttcattttnttntttcangttcaaggggaagtttttggaag

SEQ ID NO: 510 - DNA, 789 bp, Homo sapiens
  misc_feature (1)...(789): n = A,T,C or G
gntttnnnncnnttttaatntacatacanctacttgttctttttgcagggatcccatcgattcgaattcggcacgagggaacccccaccattaagctaaagtaaaacccttttgagggaagagggagactggggagaagggaaaagagagaaggcagggagagtagggagagaaaaccttccagcagcccagtaaactgcgggcgaagagatctacccgtctccctccctcccacagttaccattggccttgtcatcgcaagcatttgacaaagacttgcttgtttgggcctgtcacctcctgaaaggctgctttagctgtggatgcccttgattaagggagagagcgcctaggagctgcctgccccanctggggtgacggctgtagggctgggtctatgttgcaagccctatatcctancatgcagtggaaagtgcttagctctctccctcctgacctctgggcagccagtcatcaaagcagagagacgtggcggcatgtgggcagcatgcccaggttccttgctgactcagcacttatttctgtagttttaaaaaagaatttaatgtttttggttgtatttttttgggggggtgagggtgggcaaaaacatgggggtagttctgagttgttagaaatgtttctgaatcaagtttgtttgaaaacacgttgtgcctttgtacccattataagatggtcataanacccaagaactgataagctttgggttttttttggtttggtttggttttttgcttcattttacccattcatgcctagggtttccat

SEQ ID NO: 511 - DNA, 776 bp, Homo sapiens
  misc_feature (1)...(776): n = A,T,C or G
catanagntcttgcctttttgnaggacnctcgattcgaattcggcacgagcccccatcttcactggttattccacttatttaaaatgtccagaataagcaaatctccatatagaggaagtagattagtggttgcttcgggatgggaggaatgggaagattgaggtctttcttttgcagtgataaaaatgtcctaaaattgactgtagcgatggtcacacaactctgaatatgcttaagaccattgaattacacactttacgttggtgaattgtatggatgtaaattatagttcaataacatagttacaaaagataatcaaaagcatgaaagcactgttgatgtggnttggatctgtgtcctcaccgagtctnatgttgaaatgtaagccccctggtgggaggcgatgggattatggggcagantcctcacaaacgggttagcccacccgctcaggctgttctcctgatattgagtcctcatcacatctggttgcttcaaagtgtgtggngccttccctctatctcctactgctctggccatataagangtgcctgcttctccttcgccttntacatgattgtaaagtttcctgagcctcctagaacnaaagctgctgngctttctgtccatctacangancgtgagcccaattaaacctcttttttttttttnngaggnnntttnntnncnntccnnncantttnananncctngnannggtttnnaaaaanaananngnnaannnnnnnnncccccngcccttttaaaataaaaa

SEQ ID NO: 512 - DNA, 917 bp, Homo sapiens
  misc_feature (1)...(917): n = A,T,C or G
ttatttcataaactattgttctttttgcaggatccatcgattcgaattcggcacgagggctgcgaggttttcggctttggctcctgatatgcagcgacagaattttcggcccccaactcctccttaccctggtccgggtggaggaggttggggtagcggaagcagcttccggggaaccccgggcgggggcggaccacggccgccctcccctcgagacgggtacgggagtccgcaccacacgccgccgtacgggccccggtctaggccgtacgggagcagtcactctccgcgacacggcggcagcttcccggggggccggttcgggtctccgtcccctggcggctaccctggctcctactccaggtcccccgcggggtcccagcagcaattcggctactccccaaggcaggannanaancanccncanggttntncaaggacatntacaccatttggatcanggcgtnttanaaaaaaaanaatgttaatganttggaaaantatttnaaagcctttnaatgnttnnnnnaatccttngggnttggccttanaaanccaanattntngtnggngggntnttaannccnnncaantncnnnnnnattncnttnaaaacntttnnnccanggncnnaaaaaaanggggnaannaaaaaacttttttnnttnaannantttttttggaaaatttnaaancntnggaaaancntttnnntngttnntnangggaaannantnttttgggnncnaaaaaacnttttnaannnntnnnggttnnnannnnttaaaaantttnnncccccaannnnntnnanngnancttttnnanttngggantaaanttnnnnnnanggggnnttttttnngnnnaatttnnnnnnannnnnnnannnangggnntttngnnngnaannntnn

SEQ ID NO: 513 - DNA, 780 bp, Homo sapiens
  misc_feature (1)...(780): n = A,T,C or G
tnnnnnntttaaatccattagctacttgttctttttgcaggatcccatcgattcgtgcgggagcacccgagcctgcggctccagacggacgcccgcaaggtgaggtgcatcctgacaggtcacgagctgccctgccgcctgccggagctccaggtctacacccgcggcaaaaagtaccagcggctggtccgcgcctccccggccttcgactatgcagagttcgagccgcacatcgtgcccagcaccaanaacccgtangtggtccncggcggcgcggggaggcccagggcaatnngacagnccctccgnttgactccgccagtgctgcagnccctactctttcanagttgggagccctgggacccaggcaccaattgttcttgcaaactcaccctgcggcacatcaacaagtgcccanaacacgtgctgangcacacccaaggccggcggtaccagcgagcttttgtgtaaatatgaagaatgtctnaagcaaggggtggagtacatgcctgctgcctggtgcacccgangangaaganggaaggacaaatggacngtgaacggccttcgcccgcgggaaagcttctgggagcccacattcaatgatgaagggggagctgcaagtgatgacagcatgacagacctgtncccctgacttttcaccagaaggaccttgaacacngaggatggggatggactgatgatttttgacaacaaagaggttgaaaggcaaanccccaaaaaaaaggccttgtgaaggcagganaaanacaacctntc

SEQ ID NO: 514 - DNA, 793 bp, Homo sapiens
  misc_feature (1)...(793): n = A,T,C or G
tttnnnngntttannncattttgctactngttctttttgcaggatcccatcgattcggaattatagtattgacgtgaatcccactgtggtatagattccataatatgcttgaatattatgatatagccatttaataacattgatttcattctgtttaatgaatttggaaatatgcactgaaagaaatgtaaaacatttagaatagctcgtgttatggaaaaaagtgcactgaatttattanacaaacttacgaatgcttaacttntttacacagcataggtgaaatcatatttgggctattgtatactatgaacaatttgtaaatgtcttaatttgatgtaaataactctgaaacaagagaaaaggtttttaacttanagtagccctaaaatatggatgtgcttatataatcgcttagttttggaactgtatctgagtaacagaggacagctgttttttaaccctcttctgcaagtttgttgacctacatgggctaatatggatactaaaaatactacattgatctaagaagaaactagccttgtggagtatatagatgcttttcattatacacacaaaaatccctgagggacattttgaggcatgaatataaaacatttttatttcagtaactttnccccctgtgtaaagttactatggtttgggggtacaacttcattctatagaatattaagtgggaagtgggtgaattctactttttatggttggggtggaccaatggctatcaagagtgacaaatnaaggttaanggatgattcccaaaaaaaaaaaa

SEQ ID NO: 515 - DNA, 770 bp, Homo sapiens
  misc_feature (1)...(770): n = A,T,C or G
cttattncatnnagctcttgttctttttgcaggatcccatcgattcgaattcggcacgaggttgtattggaaagcagtagtgtggacgaattgcgagagaagcttagtgaaatcagtgggattcctttggatgatattgaatttgctaagggtagaggaacatttccctgtgatatttctgtccttgatattcatcaagatttagactggaatcctaaagtttctaccctgaatgtctggcctctttatatctgtgatgatggtgcggtcatatttatagggataaaacagaagaattaatggaattgacagatgagcaaagaaatgaactgatgaaaaaagaaagcagtcgactccagaagactggacatcgtgtaacatactcacctcgtaaagagaaagcactaaaaatatatctggatggagcaccaaataaagatctgactcaagactgactctgatagtgtagcattttccctgggggagttttggttttaattagatggttcactaccactgggtagtgccattttggccggacatggttggggtaacccagtgacaccacactgattggactgccctacaccaatcagaactcagtgcccaatgggccactgttttgactcggaatcatgttgtgcactatagtcaaatgtactgtaaagtggaaanggatgtgccaaaaaattaaaaaaaaccnccaaaaaagcttccaaaaaaaaacctttaaactatagtgagtcgtntacntagatccaacatgataa

SEQ ID NO: 516 - DNA, 825 bp, Homo sapiens
  misc_feature (1)...(825): n = A,T,C or G
tttccagttttanttttttcancttttngatcnntttgcaggatccntcttttcgaattcggcacgagattctccctaaattgtngatcccactgtttacnaaactgttctnttgtgctggcntgctnantgctntgtagnncctttctgnacnntaggcattgctcttggagaacnngatgtgctttntntnaaanggcanaccagngntgnnctgnntttaatgatgcagancctnactttatccacacctggcccgtttnacatttnagtaangnacgatatttggctgatggctgaacantttctgaaatacacntttagtgtatggaantacaagaccnntaaaggnctgccaggttancatctcatctngcattcnnntcctttggcnanaaaggganatntcagaattatatttcttgatggggtcttttcaatcantgtatctgtcgaaanntcttaganaaanctatgtgntcncggtgttgtctaaaaanatnctttcaaanatgacccctggaattncctgananangcttaaacgtgagaagacnggtnggcaaaacaccctncnaaggttnttggnaangcccnantntgttttgtctggcccatataancttngcnccattnaagccncgggngagctttgnatntatattngnggngttactttctttgnncctttgcggggaacancttnnataatgcttntcnncccnanntggacntttgctttttgnnnccnnacccccccaaagggngcncacctccantgaaaaagtctttttnnaaaagggctccttnctnaaaaaaannnnt

SEQ ID NO: 517 - DNA, 1444 bp, Homo sapiens
  misc_feature (1)...(1444): n = A,T,C or G
ctctcncnncnnnncnnntctctnncnntnnnnnntnntnnnnctcnnnncnnnatctnnnnncnnctnnnnnnncntnncntccntctcttntntngctctcntntctcntncatcttnccnctattntcntnntnntcnntcntcnnnantnctnnnttctncctnnccanctntccatnntntactntcnntnntctggctnttntatntggggggtctatttnttnncttaaatcgactngttccaagtctcntancngcntctntctnnctntctntgcnctncnctggggcnttaattncccnngctnttatanaagngngnaattaaggtntcnnntctanngctntgcaaggctaatgnttagatccngntagaanncgntacatgttgggaacngacancttnctgcncaaagngggctnaggcanngnnntntgcaaannctcnnntntcnnancttgnntcncgtagancggnnncccctgaattttnnancnnggancnttaaatnntntngnggtacgannccncnnncgnnnnnncgnntannccncanngttaantgcncccnnannnantcaactctntnntcctnntnnaacnnnnttantctannatnnttacnnntnagnttttcctcnctnacnnctctgtncttnttnnatcttntncttctcncttnatttntatctcntntntntnctnccctnatctatctnctacnctctnttccncttctccctnncntctctcatcatatcccacgcnactnancccctctnnctcttacctnnntnctctcntcntatctcnnnaccctctttctntntcttatnncncctatcctctacttattctcctcctattntnccactcacccttcntntntctncnctnntcttntnctatttntactntcnctattcctncntctctnntgnctcccaccccctcttcctctcnctctcctnnnnnnactactctcaccntctcnnctntcnctctacnnntnnananntccttantttcctnctcatcacantactcttccctctcatnntcananctaanttntnctctcactctaccactctntnctccactcatatnanacttctatantnctaatcctatcttcttaaacntctcctcttatcnctctaanctcctcttcntcgctanctccnntncaactcgnaaatctctccaatnctnccccactctaaaaatnncncntcngantcccacttttcngngcanaatnnaacncnantccnctccctttagctatctctctanaaaccccntttctcaacaggnaccnccctntntctcnaaatcctcatnctnctactttatatntcnccaagcctcncctntgtaanagcatctcnctntccnccaatnnanatctccctnctccnatanatntnanat

SEQ ID NO: 518 - DNA, 706 bp, Homo sapiens
  misc_feature (1)...(706): n = A,T,C or G
ctaatggctggnngctcgttctttccgcaacancccngcgantcgaattcggcacgaggtccgaagaaaaagactgtggtggcggagatgctctctccaatggcatcaagaaacacagaacaagtttgccttctcctatgttttccagaaatgacttcagtatctggagcatcctcagaaaatgtattggaatggaactatccaagatcacgatgccagttatatttaatgagcctctgagcttcctacagcgcctaactgaatacatggagcatacttacctcatccacaaggccagttcactctctgatcctgtggaaaggatgcagtgtgtagctgcgtttgctgtatctgctgttgcttctcagtgggaacggactggaaaacctttcaacccactgctgggagagacttatgaattagtgcgagatgaccttggatttagactcatctccgaacaggtcagccatcacccaccaatcagtgcatttcatgctgaaggattaaacaatgacttcatctttcatggctctatctatcccaaactgaaattctgggggaagagtgtagaagcagaacccaaaggaaccatcaccttggagctccttgaacacaatgaggcatatacatggacaaatcccacctgctgtgtgcataatatcattgtgggtaaactgtggatcgaacagtatggcaatgtggaaat

SEQ ID NO: 519 - DNA, 734 bp, Homo sapiens
  misc_feature (1)...(734): n = A,T,C or G
tngtaccaattatctgctggctanntagcctaaanagnttggtcngggcgaattcggcacgagggnaaagcagnaagtaatgagcttgtccgtcagctggtagctttcattcgtnaaagagataaaagagtgcaggcgcatcgaaaacttgtggaagaacagaatgcagagaaggcgaggaaagccgaanagatgaggcggcagcagaagctaaagcaggccaaactggtggagcagtacagagaacagagctggatgactatggccaatttggagaaagagctccaggagatggaggcacggtacgagaaggagtttggagatggatcggatgaaaatgaaatggaagaacatgaactcaaagatgaggaggatggtaaagacagtgatgaggccnaggacgctgagctctatgatgacctttactgtccancatgtgacaaatcnttcaagacanaaaatggccatgaagaatcacgagaagtcnaanaagcatcgggaaatggtggccttgctaaaacaacagctngangangaacgaagaaaatttttcaagacctcaaattgattgaaaatccattagatgacaattcttgaggaagaaatgngaaagatgcaccaaaaacaanaagctttctacacantnaaatccnannaactccatccntctanaactatnngtgagtccttnttacntcnatccagacatgantancnatacnattgatggaacc

SEQ ID NO: 520 - DNA, 701 bp, Homo sapiens
  misc_feature (1)...(701): n = A,T,C or G
ctaatgctggctnttgttctttttgcaggatcccatcgattcgaattcggcacgagcccacatgtaccaggttgagtttgaagatggatcccagatagcaatgaagagagaggacatctacactttagatgaagagttacccaagagagtgaaagctcgattttccacagcctctgacatgcgatttgaagacacgttttatggagcagacattatccaaggggagagaaagagacaaagagtgctgagctccaggtttaagaatgaatatgtggccgaccctgtataccgcacttttttgaagagctctttccagaagaagtgccagaagagacagtagtctgcatacatcgctgcaggccacagagcagcttgggttggaagagagaagatgaagggacatccttggggctgtgccgtgagttttgctggcataggtgacagggtgtgtctctgacagtggtaaatcgggtttccagagtttggtcaccaaaaatacaaaatacacccaatgaattggacgcagcaatctgaaatcatctctagtcttgctttcacttgtgagcagttgtcttctatgatcccaaagaagttttctaagtgaaaggaaatactagtgaatcacccacaaggaaaagccactgccacagaggaggcgggtccccttgtgcggcttanggccctgtcaggaaacacacggg

SEQ ID NO: 521 - DNA, 784 bp, Homo sapiens
  misc_feature (1)...(784): n = A,T,C or G
naacacttngctacnngttctttttgcaggatcccatcgattcgaattcggcacgaggagatctctgggatgtcagtgaggctggttgaagaccagaggtaaactgcagaggtcaccacccccaccatgtcccaggtgatgtccagcccactgctggcaggaggccatgctgtcagcttggcgccttgtgatgagcccaggaggaccctgcacccagcacccagccccagcctgccaccccagtgttcttactacaccacggaaggctggggagcccaggccctgatggcccccgtgccctgcatggggccccctggccgactccagcaagccccacaggtggaggccaaagccacctgcttcctgccgtcccctggtgagaaggccttggggaccccagaggaccttgactcctacattgacttctcactggagagcctcaatcagatgatcctggaactggaccccaccttccagctgcttcccccagggactgggggctcccaggctgagctggcccagagcaccatgtcaatgagaaagaaggaggaatctgaagccttgggtaaggatttggggcacagtaccaggaggggggcttggtgccagacctcatgaggaagaaggattttcctatgtacagagaaggggacccctgtcctgttgggangtgctgtgcaaacctaaccaaagttactaacccctctggtttctgnggttacacaaanggggataaatacaaagctttncctnaactagccaattctatttgggtttcctgagt

SEQ ID NO: 522 - DNA, 719 bp, Homo sapiens
  misc_feature (1)...(719): n = A,T,C or G
ttctaatttnaatccttnaaatnggttctttntgcaggatcccatcgattcgaattcggcacgagagaacacaggtgtcgtgaaaactacccctaaaagccaaaatgggaaaggaaaagactcatatcaacattgtcgtcattggacacgtagattcgggcaagtccaccactactggccatctgatctataaatgcggtggcatcgacaaaagaaccattgaaaaatttgagaaggaggctgctgagatgggaaagggctccttcaagtatgcctgggtcttggataaactgaaagctgagcgtgaacgtggtatcaccattgatatctccttgtggaaatttgagaccagcaagtactatgtgactatcattgatgccccaggacacagagactttatcaaaaacatgattacagggacatctcaggctgactgtgctgtcctgattgttgctgctggtgttggtgaatttgaagctggtatctccaagaatgggcagacccgagagcatgcccttctggcttacacactgggtgtgaaacaactaattgtcggtgttaacaaaatggattccactgagccaccctacagccagaagagatatgaggaaattgttaaggaagtcagcacttacattaagaaaattggctacaaccccgacacagtancatttgtgccaatttctggtttggaatggtgacaacatgctggagccaat

SEQ ID NO: 523 - DNA, 710 bp, Homo sapiens
  misc_feature (1)...(710): n = A,T,C or G
tnnncttcaaatcgntngctcttgttctttttgcaggatcccatcgattcgaattcggcacgagagattatgagcatgtagaagatgaaacttttcctcctttcccacctccagcctctccagagagacaagatggtgaaggaactgagcctgatgaagagtcaggaaatggagcacctgttcctgtacctccaaagagaacagttaaaagaaatatacccaagctggatgctcagagattaatttcagagagaggacttccagccttaaggcatgtatttgataaggcaaaattcaaaggtaaaggtcatgaggctgaagacttgaagatgctaatcagacacatggagcactgggcacataggctattccctaaactgcagtttgaggattttattgacagagttgaatacctgggaagtaaaaaggaagttcagacctgtttaaaacgaattcgacttgatctccctattttacatgaagattttgttagcaataatgatgaagttgcggagaataatgaacatgatgtcacttctactgaattagatccctttctgacaaacttatctgaaagtgagatgtttgcttctgagttaagtagaagcctaacagaagagcaacaacaaagaaattgagagaaataaacactggccttggaaagaaggcaggcaaagctgctgagtaatagtcagaccctaggaaatgat

SEQ ID NO: 524 - DNA, 730 bp, Homo sapiens
  misc_feature (1)...(730): n = A,T,C or G
ttnnnnntttaancnttcaaatcnctaggctacttgttctttttgcaggatcccatcgattcgaattcggcacgagcccacactcggacactgtggaattctaccagcgcctgtcgaccgagacactcttcttcatcttctactatctggagggcactaaggcacagtatctggcagccaaggccctaaagaagcagtcatggcgattccacaccaagtacatgatgtggttccagaggcacgaggagcccaagaccatcactgacgagtttgagcagggcacctacatctactttgactacgagaagtggggccagcggaagaaggaaggcttcacctttgagtaccgctacctggaggaccgggacctccagtgacaccggcccctncctctacccacccccttcccccgcatgctgatccccctgcccaggtaagggccctgccctggaagactggagggaggccccaagccacggggcatccccctctcccaggaagcagggagggggccgggaggttttcctctcaagccccaccctgggggcccgggggcgagggctgccccctcctcccctccccagtgagggacattttttggtaaaacctattttcattttggaaaatatttatgaataaatagttttatatgaaaaaaattntngnnnttnnnatnnnanaataaaancntcgnncctcttaaaactatagtgaagtcgtattaccttag

SEQ ID NO: 525 - DNA, 711 bp, Homo sapiens
  misc_feature (1)...(711): n = A,T,C or G
gcngntnttnantttcaaatcgctnggctacttgttctttttgcaggatcccatcgattcgaattcggcacgaggataaatacctcagcccctcgccttcctcaacccacctggcaagtcttcttaggatctgatcccagttttctggaagcaatcctaccccagcccaagcttcccagagtcgagccttaatccttctcacttctcagtgtcagagcagaaatgaatcctggggttgactgtgtccattcgggttattagcagctaagaagcccagacgagtagtgtgagctgccttgggagcctcagtgagggcactgggactggcctcactctcttgcccccagcctagtgggctttctcctctgtctctccggtggccccaggcaatcgactgcatcacgcagggacgtgagttggagcggccacgtgcctgcccaccagaggtctacgccatcatgcggggctgctggcagcgggagccccagcaacgccacagcatcaaggatgtgcacgcccggctgcaagccctggcccaggcacctnctgtctacctggatgtcctgggctagggggccggccaggggctgggagtggttagcccggaatactggggcctgccttagcatcccccatagcttccacagccccagggtgatctcaaagtatctaattcaccttaacatgtgggaagggacaggtggggcttgg

SEQ ID NO: 526 - DNA, 692 bp, Homo sapiens
  misc_feature (1)...(692): n = A,T,C or G
tacangctacttgttctttttgcaggatcccatcgattcgaattcggcacgagagaacagggagaagagaggaagagggagctgcaggtgccagaagagaacagggcggactctcaggacgaaaagagtcaaacctttttgggaaaatcagaggaagtaactggaaagcaagaagatcatggtataaaggagaaaggggtcccagtcagcgggcaggaggcgaaagagccagagagttgggatgggggcaggctgggggcagtgggaagagcgaggagcagggaagaggagaatgagcatcatgggccttcaatgcccgctctgatagcccctgaggactctcctcactgtgacctgtttccaggtgcctcatatctcgtgactcagattcccgggactcagacagagtccagggctgaggaactgtcccccgcagctctgtctcccttgctagagcccatcagatgctctcaccagcccatttctctactgggctcctttttgactgaggagtcacctgacaaggaaaaacttctatcagtactttgatatgtcacagtttcatgtttatccagttcaatgtatttttaaatttttccttgagacttctttgactgatagattattgtgaatgtgtttttaaatttccaaatgtttanggattttcatatctttcttatgctgatttccaa

SEQ ID NO: 527 - DNA, 769 bp, Homo sapiens
  misc_feature (1)...(769): n = A,T,C or G
gttctngttctttttgcaggatccctcgattcgaattcggcacgaggccaagcctcggcctccactgcacctgctgcggagtgggcacctttgcctgcaaggccttttncccantgnccaatggtantttaaccagggtttttgncnnttaaggaggccttngtggtgggtngttaatctggccnttccntattgaaaagctcctgttattgtccacagaccagaaggacttgtaaccttggtcccacagtctgacttnggcttttcaagcacccagaaaacttagagggaatcttatagattccagaacttaaggatacctcaagggatagggtcacagccaagaagtncaaaggaatcttcagtctggaacaaaaacagaaccctttcatgattgacaaangtcactttctgtttgcctggaccaagctactncagatcatctgaccaactcttaaaaatcacggccaggcacagtggctcatgcctgtaatcccagcactttgggaagcaaaagtggcaggatcattncagcccaagagttcaagaccagcctgggcaacacagtgagtgagaccctgctctatttaagaaaaatnattaagaaatttattaaaaaagaagaatcaggaaaccaagtncaacccaacttaacctcaatgaaccagcccctaacacagatgangggatttgggactgataagctctgtgctgngtccatggcccgtcanttatcaaggttgcacttttaaatgnggtatttttatgn

SEQ ID NO: 528 - DNA, 757 bp, Homo sapiens
  misc_feature (1)...(757): n = A,T,C or G
tnaatatcagctcttgttctttttgcaggatccctcgattcgcangagggtgttcgactgctngagccnagcgaancgatgcctaaatcaanggaacttgnttcttcaagctcttctggcngngattctgacagtgaggttgacananagntaancaggaaaaacaagtngctccagaaaancctgtacagaaacataagacaggtganacttcgagagccctgtcatcttctaaacagagcagcatcngcagagatnatnacatgtntcatattgggaaaatgaggcacgttantgttcgcnattttaaaggcaaagtgctaattgatattanagaatattgnatggatcctgaaggtgaaatgaaaccaggaagaaaaggtatttctttaaatccanaacantggagccagctgaangaacagattctgacattgatgatgcagtaagaaactgtgaaattcgagccatataaataaaacctgtactgtctagttgntntaatctgtctttttacattggcttttgttnnctnaatgttctccangctattgtatgtttggattgcagangaatttgnangatgaatacttnnttttaatgngcattattaaaaatattgagtgaagctnatngtcaactttattaaggattactttgctgccaccacctagtgtcaaataaaatcaagtaatacaatcttaataaacntttaaactataaaaactcgacccttagacctatantnagtcggttn

SEQ ID NO: 529 - DNA, 821 bp, Homo sapiens
  misc_feature (1)...(821): n = A,T,C or G
tnannnanncannnnnnnnnnnnnntttgaagccattgctacttgttctttttgcaggatcccatcgattcgaattcggcacgagagcaattccactcctagctccacccacaggaaattgaaagcaaagacgcaaacagatgcctgtgcaccaaagttcacgggcaagcatccttcggccttaatgggcagcattccgtcgtcacaagcgggcattcatcctttcatcaatagcgggcagcattccgtcgtcacaagcgggcagcattcctttcgccacaagcgggcagcatcttgtccgtcacaagcgggcagcatccttcgccaaagcgggcaagcatccttcgtcatagcggcagcatcctttgccatagcgggcaaggtggaaaccctgtccatccactgaggcgtgcatagactaaacatggccagtccaggcactggaatccaggcccgtagaacggcgcccacggtcaaaaggaatgagaccctgatgcactgggcgacacagacgggcgacacagacttggagacatcatgctaagtgaaaagccaggcacacggagcggacggcgtgatcctgctcacgtgatgtgtcccgaatgggcacgttcagagggaagaagggagatggcgcttgccggtgcccggggacnggggttgggagcgacggttgctggtttggggtttctttctggggtgangaantggttttgatatttggnccgttggtgatgtttgcatacctctgaatatgcttaaganccacagaattgaccactttaaatggatgaattgnatggtattgggaattacccaan

SEQ ID NO: 530 - DNA, 765 bp, Homo sapiens
  misc_feature (1)...(765): n = A,T,C or G
gnntttnnnnnnnnnnnttttatnnntacagctacttgttctttttgcaggatcccatcgattcgaattcggcacgagactaccccggctacggttcccccatgcctggcagcttggccatgggcccggtcacgaacaaaacgggcctggacgcctcgcccttgcccgcagatacctcctactaccanggggtgtactccggcccattatgaactcctttaagaaagacgacggcttcagcccggtaactctggcaccccggatcgaggacaagtgagagagcaagtgggggtcgagactttggggagacggtgttgcagagacgcaagggagaagaaatccataacacccccaccccaacacccccaagacagcagtcttcttacccgctgcagcccgtccgtccaaacagagggccacacagataccccacgttctatataaggaggaaaacgggaaagaatataaagttaaaaaaaagcctccggtttccactactgtgtagactcctgcttcttcaagcacctgcagattctgattttttggtggtgtgtctcctncattgctgttgttgcagggaagtcttacttaaaaaaaaaaaaattttgtgagtgactcggtgtaaaaccatgtagtttaacagaaccaganggttgactattgttaaaaacaggaaaaaaataatgtaaggtctgttgtaaatgaccaanaaaaaaaaaaaaactcngcctntaaactnttntgagtcgtnttcgtaaatccaan

SEQ ID NO: 531 - DNA, 768 bp, Homo sapiens
  misc_feature (1)...(768): n = A,T,C or G
gnntttnnnnnnnnnnnttttaagntactgctacttgttctttttgcaggatcccatcgattcgaattcggcacgaggttcttcaaagccaaccaagacaggcttagcagttttagagcttcagaacaaattgccaaaagccagagttgtttatgctagtgcaactgggtgcttctgaaccacgcaacatggcctatatgaaccgcttggcatatggggtgaggggtactccatttagagaattcaagtgattttattcaagcagtagaacggagaggagttggtgccatggaaatagttgctatggatatgaagcttagaggaatgtacattgctcgacaactgagctttactggagtgaccttcaaanttgaggaagttcttctttctcagagctacgttaaaatgtataacaaagctgtcaagctgtnggtcattgncagagagccggntcagcaagctgcagatctgattgatgctgancaacgaatgaagaagtncatgtggggtcagttctggctgtcaccagaggttcttcaaatacttatgcatagcatccaaagttaaaagggttgtgcactagctcgagaggaaatcangaatggaaaatgtgtngtaattggctgcagtctcaggagaagctnnaacattagaactttngaagaaggcnggggagaattgatganttggttcaactgccaaagtgtgtgcantcactcattggaaaacatttnctgctccagcngggaaaacttatggttacttggn

SEQ ID NO: 532 - DNA, 761 bp, Homo sapiens
  misc_feature (1)...(761): n = A,T,C or G
cgtnttttnnnnccnanngaaagcccttggctacttgntctttttgcaggatcccatcgattcgaattcggcacgaggatcagcccacctcggcctcacaaagtgntgggattacaggcgtgagccaccttgcccacccacatcatacagttgaaatgaaactttgccacaaccagcctttgctgtacacacacatatatcactgaacctggttgaaataaagntttttttctttttcctctggtattctgggttctgaagtctggtattctggtattctgggttcaaaagtatgacttgagagtgttgctctggtattctgagagttgctctgtattctgggttctgaagattatttgaaaaataactcctactacattgaaatgcagacttaaaaatttaaacattggattaggcagtcaaaaaaaccaagcaagcataaaaggtcaataagttgtaatcttgatagtaaaggtggaaaacttattataaatggaaagaaagtttatttccttttttggttgatgggcagtatgccatattatacccaaagttcttttaaaaaatatttccatcaccatttttatttaaaataaacatttgagggaagtaccaaggcagcttttttcctcaaaagtacctggtcctctttgggaatagcacattttangggcattgggtaatcctgagattttactcantaaatcctgatggtactgggtgtaaaatatctttagtnggattgaaggccttgnggggga

SEQ ID NO: 533 - DNA, 735 bp, Homo sapiens
  misc_feature (1)...(735): n = A,T,C or G
taaacatcnggctacttgttctttttgcagggatcccatcgattcgaattcggcacgagacactgtcccactccatcacccaggctggagtccagtggtgtgatcatagctcgctgcatcctccagttcctgggttcaagccatccctcctgcctcagcctccccagtagctggaactacaggtgtgtgccatcacacctggctttacatttttctgtggggtcttactatgttgcccaggccggtctcaaactcctgagctcaagtgatcctctgcctcagcctccagagtatctgggattacatatgtcggctaccgtgtctggccgttcacatctttggccactatttgcttgtgaaaaggtataatgaggtggtacttatcatttttactgngtctcatgttttgtatatttttgtttcatcaactaagatgcactgtaacatctctgaaatctggatatattatcaatggtttatcatagttttgttagcaatacactgtcttttagtggtgcctaaaataatggtatagttgtgaggtgatcttagatttgatgaagcacagtatgcaggtaggcctaatgggggaagatggtaatataaaagcaagaagtattttttttttgtaatgactgaaagctgtctgtggatgacctaccctttnctttaaacacgattntntcacttncaactncaaacttgctcaactaatnctttaaaaataacttgagc

SEQ ID NO: 534 - DNA, 735 bp, Homo sapiens
  misc_feature (1)...(735): n = A,T,C or G
natngnttgctcctngttctttttgcaggatcccatcgattcgagacaacccagaaacaaattcatacatctatggtgaccacttttgacaaaggaatgaagaacatacactgggggaaaagataatgtctttaataaatggtgctgggaaaactggntntccantntgcagaagaatgaaactagacccccatctcttagcatatacaaaaatcaaaattaattaaaaagttaaatctaagacctcaaactatgaaacagctaaaagaaaacatcggggaatctctccaggacattggagtgggcaaagatttcttgtgtaatacctgacaaacaggcaaccaaagcaaaagtggacaaatgggatcacatcaagttaaaaatcttctgcattgcaaaggaaataacaaagtgaagagacacccatagaatgtgagataatatttgcaaactatccatctgtattaggccatttttgaagtctacaaagaaatacttgagactgagtaatttataaagaagaggtttaattggctcacggttttgcaggctgtcaggaagcatggtgctaacatctgatcagcttgtagggaggcatcaggaagtttccacccatggtggangcaaaaggggaataagtttctccatggcaggtgcagggcaaaaanangggggaagggaagtgccncacaaccagatcttgtgagtnctcagatttgnggngggngcttgngg

SEQ ID NO: 535 - DNA, 735 bp, Homo sapiens
  misc_feature (1)...(735): n = A,T,C or G
tnaannanagctacttgttctttttgcaggatcccatcgattcgaattcggcacgaggtccatacatggagctccctggacccgtgtgctctcgtgtgactgaacgttttgtgatgaaaggaggagaggctgtctgcctttatgaggagccagtgtctgaattgctgaggagatgtgggaattgcacacgggaaagctgtgtggtttccttttacctttcagctgaccatgaactcctgagcccgaccaactaccacttcctgtcctcaccgaaggaggccgtggggctctgcaaggcgcagatcactgccatcatctctcagcaaggtgacatatttgtttttgacctggagacctcagctgtcgctccctttgtttggttggatgtaggaagcatcccagggagatttagtgacaatggtttcctcatgactgagaagacacgaactatattattttacccttgggagcccaccagcaagaatgagttggagcaatcttttcatgtgacctccttaacagatatttactgaaggaatctaggttgtattttcagtggacaatgggaataaagcatttctaaagcaccgactggagaggaaggcaacagaaacaaggagagaagcccgagagacatgtctgcgtgctgccacgcatctgancgattgctcttgtgaagagtttgtcactgaacattttcaggggaggctgtttacccagcnatgtnctnaacan

SEQ ID NO: 536 - DNA, 785 bp, Homo sapiens
  misc_feature (1)...(785): n = A,T,C or G
gccccccnnnnnnnnnnttttcaaannccnttnnnnnnnnnngnnnnttttannnnnttnttannnnacagctcttgttctttttgcaggatccctcgattcgattcggcacgagctaccttgggctggccctctatnatgctntgaggggagctgggacagatgatcntnccctcntcagngtcatggntnccangngtgagnttnatctgccnnacatngtgacggagtttaggaagaatgntgccncctctntttattccatgattaaggganatccatnnggggactataagaaaagcnnttttnctgctntgnggncaanangantnacnngncccgggnnanagctcctatgctgtntgcctgcaccaccccctgccttccttcatacctttccntggatatgnatgccagggcttnncacattgcctnattnatactnacntgctnatgaccaanacatncacgtgataacacaaacantgggtgcttgnttctgatcnctagaggnganctnttggnnngntggagnactnaantnttctnagtgtnacttnagttcaatgcctggccatntgcnatnaccttatatcntncaaagaggctactgtgcttttanccttttttaaaacctccatctgtattacattgnnaaccangtttctttaatnaggagcttgacctctanantgggaactcttgggaatggncttagtgaagttcgcnactaacttaacctgaaaattatnatgnnctgtttnacctatcatgttnataactnt

SEQ ID NO: 537 - DNA, 967 bp, Homo sapiens
  misc_feature (1)...(967): n = A,T,C or G
agtanggcgnttcctaatnnannnggctaagcgactttnaaagangaggctngcgtgntgaataccgnncgaggggggatnacaatagtanacnnggtnccaatncatgcttaacaccgcatntctttaccccccnannnncacanatgcagacncacacatngcanncgnacacncagacacacacangcaagcactnncatgcatggcccatgctcacacacntgnannnaacatgcngtagacatntnagacacgtcatgtnacacatgnnacacangnnnaanacactgctttncangcanacncagacggcacnnngagacanacatgcnnaaacaacatgctcnctcacntnnanncgntgggccngtagtagtgtactgtgggtgnnactgggtgccatcnacnnngtattttacgnnctttnaactaaaaancttggagccttnanttnntntggtgantncaatncctanaantnncttgagngggatgaaccctaanancctggccctnntnccnctttcaaggccnagnaattganattattncntantngnncacgaagcttntggtancangngncccgagnnctnttnaaanttnnctnttttnanaatnaaacattttancggttctnagganccgngcctncngggtanggannnaattgtncctgggnatagttctcacaantnatnttnaaggggnnaagngatnngngnggnccntntatgnggcnngccaannaanggggtcgnngttaanatattccaagntaacanangnacnatggnaccnatccctntnngaagnaaggaactncctgnncgactannnactatgnnaaatattctcacatntacanaaaaagnaggnnccnnggtncttnaagnttntgcatagnnactatncntgggacgngttaacnnanattntatgctttannngatnggggcttnnn

SEQ ID NO: 538 - DNA, 892 bp, Homo sapiens
  misc_feature (1)...(892): n = A,T,C or G
gctagttngaagaggtgtttctaangnntnggaatcgacatctnnnnaggcngnccntgcgattcgctttgctctctccattccaagttgttctctgttctagaaagcngatgnngggntacatctactgtttttgcctaaacagaatccctttntcctttttttgttaaaaggctcatncctaatattacattgctctggaacgantgacaataccanaactcagcaccntgatcggaccgggacaatcagattatctaattcctcagcaaacggagatcgatccgaaaagtggaaatatganctcntnctttgtgntggcatatggaccctgagagaaagaaactttaatcttttactcttggactgcaatnaagtntagctgcctaaaaatcnntttcntgacacttngnaggtttgtccacaatcgggngaaattanngggtnngacntaancactggatgaaaaaaaatnccgnttanttntattncnnttccanncttntnaaatananantttntcanccttnnntaatactattanntatatntnttnnncccnnatnnnccttcttnctcctacnncnntncnatntnnnnnnangntcnncnannnnttctnttatttctannatatntcntancnttnactaaaacctccnctcgtnnanattncnntataatattntctctagannttntnntntnttgnnncttaaaanctcntctatccctantatnantnattcttaccatnaaatacactanaagtnntntcacgagacncgntatgttantncanactataatcgcttncatntanntatatntaaaantgctatncagnnagnngntnttatatntttanctngnnaggntatcctcnatancc

SEQ ID NO: 539 - DNA, 751 bp, Homo sapiens
  misc_feature (1)...(751): n = A,T,C or G
gnnnaggttntagancagctcttgttcnttgngcaggatccctcgattcgaattcggcacgagagtgtcagttttcctaatctcagtccaggtaggaattaagaaatatctcaagtgttgatgctatccaagcatgttggggtggaagggaattggtgcccagaaaatgggactggagtgaggaatatcttttcttttgagagtacccccagtttatttctactgtgctttattgctactgttctttattgtgaatgttgtaacattttaaaaatgttttgccatagctttttaggacttggtgttaaaggagccagtggtctctctgggtgggtactataatgagttattgtgacccacagctgtgtgggaccacatcacttgttaataacacaacctttaaagtaacccatcttccaggggggttccttcatgttgccactcctttttaaggacaaactcaggcaaggagcatgtttttttgntatttacaaaatctagcagactgtgggtatccatattttaattgtcgggtgacacatgttcttggtaactaaactcaaatatgtcttttctcatatatgttgctgatggttttaataaatgtcaaagttctcctgttaaaaaaaaaaaaaaaaaaactcgancctntanactatagtgagtccntattacgtagatccagacatgatnagatcattgatgaatttggaccaacccaactagaatgcagtgaaaaaaatgcttttnt

SEQ ID NO: 540 - DNA, 761 bp, Homo sapiens
  misc_feature (1)...(761): n = A,T,C or G
gntnggntcnagancagctacttgttcttttgcaggatccctcgattcgaattcggcacgagcctgcagccactaatgcattgtgtatgataacaaaaactctggtatgacacattttctgtgatcattgttaattagtgacatagtaacatctgtagcagctggttagtaaacctcatgtgggggtggggtgggggtgtattccttgggggatggtttgggccgaatggggagtggaatatttgacatttttcctgttttaaattctaggatagattttaacatcctttgcggtcccagtccaaggtaggctggtgtcatagtcttctcactcctaatccatgaccactgtttttttcctatttatatcaccaggtagcccactgagttaatatttaagttgtcaatagataagtgtccctgttttgtggcataatataactgaatttcatgagaagatttattccaccaggggtatttcagctttgaaaccaaatctgtgtatctaatactaaccaatctgttggatgtgggttttaaaaaatgtttgctaactacccaagtnagatttactggattaaatggcccttcgggtctgaaaaagcttttttaacttcttngcttaaaatgccgtttaattttgataagatncttnaaatngcctccaaaagtgttananccaatcatttnaaataaaccnggntgtatattgcatnatgtgtacatgcntatncccttctggttaaaactnaaaaaaaaat

SEQ ID NO: 541 - DNA, 748 bp, Homo sapiens
  misc_feature (1)...(748): n = A,T,C or G
ggtttantttaaatccntncncagctacttgttctttttgcaggatcccatcgattcgaattcggcacgagcggacccatcggagcgtaacctggatctccgcaggcctggcggaggccggccacctggaggggcattgcttggttcgcgtggtancagaggagcttgagaatgttcgcatcttaccacatacagttctttacatggctgattcagaaactttcattagtctggaagagtgtcgtggccataagagagcaaggaaaagaactagtatggaaacagcacttgcccttgagaagctattccccaaacaatgccaagtccttgggattgtgaccccaggaattgtagtgactccaatgggatcangtagcaatcgacctcaggaaatagaaattggagaatctggttttgctttattattcccttcaaattgaaggaataaaaatncaaccctttcattttattaaggatccaaagaatttaacattagaaagacatnaacttactgaagtaggtcttttagataccctgaacttcgtgtggtcttgnctttggttataattgctgtaaggtgggagccagtaattatctgcagcaagtagtcacncttttcagtgatatgaatatcatctttggcttggangccantngacaacctgncattactgactttttgaaaanaaccctctggatattgatgcctcgggtgtggttggactgncatttagtggaccccgaatcc

SEQ ID NO: 542 - DNA, 784 bp, Homo sapiens
  misc_feature (1)...(784): n = A,T,C or G
gtnnnnntngtgtaatcgcttggctgcaggatccctcgatggcgaattcggcacgaggtgttgctcaangagcagacccgactccntaaggtcatcattgaatgggcatnatangtttgaanactgtccaananantangngtcaatacatcaacnnctttanntgcttgatattgnnattgaanaacacangnctcngnctagttcgcctganatgatgtttaagatactccggaaggagacanantgttntgantgcggattaganaccacngaagnnacactnaaggancancatctccacctngnaactgnattnncngaccanaaaagngaactggaccaaatgctctcaaaggtgctggcagcttaanagcgtgttangactctgcacgaagangacaggtnntntgagagcctggnnannacactctcccaaactaaactgnanctttcaacananggganccccannttggtggagaaatcaggtganctgttggcccttccacaaagangcaaattctntgagggcnagacttnancctttttgcngaaccagtncttgactgactaaatgaaagctttttaagccaggtggcccanccttaangaagcnactttttaatccancggaaccngcttgaganaaaaccntttttgacccaaaaccnggagaaccagctggcctaccaaagggaaatgggcccccatttgaacttggggttncccangaacaanccttgnccgggncaaagcccnttgttggaaaggacctcaacct

SEQ ID NO: 543 - DNA, 764 bp, Homo sapiens
  misc_feature (1)...(764): n = A,T,C or G
ntantaaatcccttgctcttgttctttntgcaggatcccatcgattcgaatncggcacgaggacccggcggcgcggacaggcttgctgcttcctcctcctnngactcaccattncagancagaanntgaaaaaatggnnganctcacccaggtaanggatgatgaagtnttnatggctnntgcatactatgcannanttntncttntgnaaatgatgcntatgagtactgtaanngnnttctatncattgncaagaanggntnttgncaatncatangactgtgtagcattcggcanaggagaaaatgncaagaactatcttcgaacagatgacanagtgtaacgggtacgcagagnccacctgaatgaccttgaaaatatnattccattncttgnaattggcatnctgtattccttgagtggtcccgacccctctacagcnntcctgtactttagactatntgtcggagcncggntctaccacaccatgtgcatatttgacacccctttcnnatccaaatatagctatgactttttttngtaggatatggannactctttccatggcttacacgntgcngtaaagtaaattggccctgtgcagaaaaacattccactcagtnttccaantggcttnttaaggaattctngaccttgcaattnatantggagnnctttccttaagatttaaaggtttganggngagccnnaggaattntnaaccnggggtaaaccctttttggaattttnagcnttgncaanaa

SEQ ID NO: 544 - DNA, 755 bp, Homo sapiens
  misc_feature (1)...(755): n = A,T,C or G
gatgctggntncnnatgcttgnngatccctcgattcgaattcggcacgaggaaatgtgtatttcagtgacaatttcgtggtctttttagaggtatattccaaaatttccttgtatttttaggttatgcaactaataaaaactaccttacattaattaattacagttttctacacatggtaatacaggatatgctactgatttaggaagtttttaagttcatggtattctcttgattccaacaaagtttgattttctcttgtattacattttttatttttcaaattggatgataatttcttggaaacattttttatgttttagtaaacagtatttttttgntgtttcaaactgaagtttactgagagatccatcaaattgaacaatctgttgtaatttaaaattttggccacttttttcagattttacatcattcttgctgaacttcaacttgaaattgtnttttnttttctttttggatgtgaaggtgaacattcctgatttttgctgatgtgaaaaagccttggtattttacattttgaaaattcaaagaagcttaatataaaaggttgcattctctcaggaaaaagccatcttcttgnatatgtcntaaatgtatttttgncctcatataccggaaagttcttaattggattttaccagctgnaatgctttganggttttaaaaataataacatttttaataattttttaaaaggacaaactttcataatnatcccggngntcctttnccnnn

SEQ ID NO: 545 - DNA, 767 bp, Homo sapiens
  misc_feature (1)...(767): n = A,T,C or G
agnttttnaatcctttggccantcgcnctttntgcangatcccatcgattcgaattcggcacgagaaaaagtnaagcttttcatgagcacanntnccttgcattgttngatgttactgatattcgtaaaatgaatattttctgttttgttctgttnnatttttttgagacaagtcttgctttgttgcccaggctggagtgcaatggcatgatcttggctcactgnaacccctgccttgcgagttcaagtgattcttctgcctnagnctcctgagtagctgggattacaggcgctcaccaccacacccagctaatttctgtcttttnagtngacacagggttttaccatgntggccaggctggtctcaaactnctgacctgaaactnctcacaccngtnatctcagcactttgggaggctgangtggaaaggatcacttgaagccatgagtttgagaccagcctgngcnacacagcngagaccccngtgntgtacaaaagcttncnacatttanctggctgaggagtnnctcacccntaacttccancnantcnnttaagcnnanncatnttgaacacntgagcccanntanggtcgatgctnntagtnaaccgtgactggaccacttacagtccaagcccgggtngccttataaaagaancggaaaacatttcnttaattcgggttnnagcnttanctatttcggaatnccttgngttttnaaaaacttgaatctccaanaaacagggttttttcttttggnccann

SEQ ID NO: 546 - DNA, 989 bp, Homo sapiens
  misc_feature (1)...(989): n = A,T,C or G
tncccttgttgaaanccctttgctcctttntnctnccgtttgncatncnattcgctcagctgaggcaattaaactggaaaagaaatagattgaaaagatactntngaagaagcagtacagaagttgggggactgaaggagagggagccactgcaggtgctagctgcttaaggggataccagtccttttacagatataatagatacagcttctgaggtggagggtgataggagtgtgtatgagaaanttgcagnttnacaactgctcntgcctcctnggcaanaggannancntttcnccnnttncnncccttatngnacacacattgncctgattggncntnccncngctagcttncagtcttnantntactcannagnnnntnggggaacncnctntcnnantatgntcccttttcctctnncntnnccnnatancaccccnctcnctttcctttctaaacttncacanntccctganaatgncttccgaatggantcttngaatttctncgcccctncntcntcataatcnttttgctnctccngctcnccctcattttnctacgtnccnccttctnnttnactgnctttaaatnttattancnncntntncnttncnatctncaanttttcnnnccnacnnnnttttnctnntnncaaatcgcgnnaaataagtnttgcncactcnnntnctancntattntccctcgcnnttntcntcatctcccgcnncactcacntnnncnnntcaattnntnnnnacncncnctgctctacnnncnatntctntncctncacaccctntancntntcnctcanaatgccttttctnccttannnctntcnttcncnnatctanccaantttnctttnacatcccctncnnntctnncccgacnatatntnacctcttnnatcncagngcntannatcnccccnttntcnctntcnctctcanncttntnttnatcttcatnnatcanncncc

SEQ ID NO: 547 - DNA, 781 bp, Homo sapiens
  misc_feature (1)...(781): n = A,T,C or G
tgtnnctttncnncctcnnccgaaatcnctttgnttctaactttcctaattacctgggctacttgcactatcccntcgatncgcatagatggccnngttactaanggtgantttccagcgcggggggcacgtggagtcactggaacatttgngcaatgctggtgggaatgtcaacccgngcnggcctctggaatangcctggcnnntcctgcnagagttaccntgtgacccagcaattccactcctagctccacccacaggantngaaagcnaagacgcanacagatgcctgngcnccaaanttcacggcagcatcctncgccatantggcancatccgtcgtnacagcggcatcatccttcatcattacggcancatccgtcgtaacagcggctacatcacttcgccacagnggcagcatctgtngtcacagnggcngcanccttngccaaagcggcagcntccttcgtcatagcggnancatnctttgccatancngcnaggtggaaaccctgnccatccactgaggcntncatanactanncatggncagtccagggcactggaanccangccgtngaacggcgccnacggtnannaggaatganaccntgatgcnctggggccanacatactggctanacanacttggagacatcatgcttanttgnannnccantcacacttgcnnncggcgtnatcctgctcacgtgatncgacccgaatgggcacttcaaatgggaanaagggngatggcactnccggtnncctnganaggggn

SEQ ID NO: 548 - DNA, 735 bp, Homo sapiens
  misc_feature (1)...(735): n = A,T,C or G
tctaaacgcttggnncttgctctttctncangnanccnntgcgntncgaattcggcacgatctagatattgcccaatcgctgcccacagtgcacatacctttccaccagtcacatgtgagagggcagattttccaaatgctcatcaccacttggcactgtgtggactataattttggccagttaggaaatggcatctcattgttttcatcttaatttgcgtcagcctgattactcattgaaacttgtgaggttgagaaacttttcttaagcttattggccattcaagtttcctcctttatgaaatggttgttcatgtcatttgctcatttttatattagattgtttttcttttttccagctgacttgtaggaactctacatcttatcaatattaatcatttatcgaaaactatttgggtgccattatcttctcctagtcaatgttttttgtttgtgatatcttttataatatataagtttttaatgttggcagaagtaaagttaatctttttggctgtgttgtgtgtcttgtttgatgtaaagatagtttctgtaatagttttgcagtttgattgntcatctttaggtcttcaattcaacctgcacatccatcccctctatcctctttcttactctgtttttctccataccacttatcatccaataatatggtcatgccctttattnaccngntttgcatatataatttggcttgtncccggttccttccctana

SEQ ID NO: 549 - DNA, 812 bp, Homo sapiens
  misc_feature (1)...(812): n = A,T,C or G
ttctaatacttggctctngttctttcngcaggatcccatcgattcgaattcggcacgaggggaaggagcgggcgtgaggccagctgaggcatggtgacccctgggaaggagcgggcgtgaggccagctgaggcatggcgacccctgggaaggancgggcgtgaggccagcttgaggcatggtgacccctgggaaggancggncgtgaggccagctgaggcatggtgacccctgggtacgggggacttgggggccgaccttggtttgcccagggcccctnctgcaccacggccacatgcggaggacggcgttgggatangctccctgggtccacagcttctgcccgtgtattggggaaccctncttggtcaaggcttcangctcttggcagatggggcaaggaaccctgaggcttccgcgcccttccatggnctctgatgtgggacacttgaacgangcacgattctgaaggactccatggatcttgggangattangcccaccttcngttggtggncnaaagccgtccttncggggcccggcttgtttaacnggacaacttttcnggtcgggcttgttgggccccaatcnttgggttgggnaanttcnccttaaaccttgggcccgnccttttaaccttttttcccaatcttttgacctttttccaaaaaggggtncccctgggctttttngggncaattggttccgggggccaaaggttgggaaaaaatgccttncattgggnaaaaccctggatcccttgttaancctttgggagnttaaaatggaatgaattttccccccgggcttttt

SEQ ID NO: 550 - DNA, 742 bp, Homo sapiens
  misc_feature (1)...(742): n = A,T,C or G
ggnnantcnatgctggtcttgtctctntctaaaagttggcnattcgaattcggcacgaggttctgtggctggcatggtctgcctgctactggagagatctcctgaganttcagttttggattggtgctgtcatcttcctgggaatgcttganaaagctgtcttctntgcggaatttcagantntccgntccaaaggagaatntgtccagggtgctttgatccttgcaaagctgctttcancagtgaaacgctnactggctcgaaccctggcatcatagtcagtctgggatatggcatcgtcaagccacgccttggagtcactcttcataaggttgtagtancaggagccctctatcttttgtnctctgcatggaaggggtcctcagagtactgggtattttncttatcccttgactctgatagtaaacctggccctntcagcagtttgacgcctgggtatttatggatattaattagcctgactcaaacaatgaagcttttaaaacttcggaggaacattgtaaaactctctttgtatcggcatttcaccaacacgcttatttggcagtggcagcatccattgggttaatcatctggacaacccatgaagtcaanaatagtgacatgtcantcggactggccggnagctnttgggtagaccatgccatntggcgccttgctggtcttccatgancccctttggcaatcatgggtcttntggcgaaccattttgcaaacaact

SEQ ID NO: 551 - DNA, 736 bp, Homo sapiens
  misc_feature (1)...(736): n = A,T,C or G
agtctaatgctggtcttgtcttttctaatgctnggcgattcgtcctggtgtcaaacactataaacctttgaccagctgagctgtgactggctgtcacntntctgagtcctgtgtgcacagtantntcctgggtcaggtaaaatccaggtnttcaagttttaaggnttttttgaanaattcgggcttntttaanacgatccntgcccaantccacaagcttgttgacagtggnttacagttngngtggcaaagtccaagttgttacactgngctttaaaaaaaatcttatctgcatgtattgttaacttagagaccatgagatctatttatcaggaccaggaagatncacacttcaggtccattgcaactgacttttttcttgtttttcttaaaaccctggtggagcctgggaagggggcctccacaattctgtggctttgatattagccccaattttacaagcacatacaagccccataattgccgcaggaaaacacaagatggaaaatgcaataacccatgcactgagacttagaaaatcatccttactaggcaaaatgtattatgatgcaataagtgccactgggnattttnacgttgggactggncaggaactgctgcaaagaaaaataacagctccttctccattatttacatttaagatgttggtggggggaaggttgggagaaattagttctgagggtatcatatgccttttttaaagaaaatgggaata

SEQ ID NO: 552 - DNA, 733 bp, Homo sapiens
  misc_feature (1)...(733): n = A,T,C or G
nagtttaanngtatgtcttgtcttttccaagatcctatccgattcgaattcggcacgagaagtgtcagttttcctaatctcagtccaggtaggatttaaaaantntctcaagtgttgatgctntccaagcntgttggggtggaagggaattggtgcccagaaaatgggactggagtgaggaatatcttttcttttgagagtncccccagttaatttntnctgtgcttnattgctnctgtnctttattgtgaatgttgtaacattttaaaaatgttttgccntagctttttaggacttggngttaaaggagccagtggtctctctgggtgggtnctataatgagttattgtgacccacagcttgtgtgggaccacatcacttgttaataacacaacctttaaagtaacccatcttccaggggggttccttcatgttgccactcctttttaanggacaaactcaggcaaggagcatgttttttngtnatttacaaaatctancagactgtgggtatccatatttnaattgtcgggtgacacatgttcttggtaactaaactcaaatatgtctttctcatatatgtgctgatggttttaataaatgtcaaagttctcctgttaaaaaaaaaaaaaaaaaaaactcgagcctttanaactntntgagtcgtntacntagatccngacatgataagatcatgatgagtttggacaaccncactngaagcagtgaaaaa

SEQ ID NO: 553 - DNA, 870 bp, Homo sapiens
  misc_feature (1)...(870): n = A,T,C or G
nagttaanagtaggtcttgtcttttgcaagatcntancgattcgaattcggcacgagtatataacaacttttgctttcaaagttgggtgggactagancncncantggaaggntggagtcagganacctggattnttgngcccgntntggnttttacagtntgcctaantttntgcagtnacttcntgccancctgtttcnttacntncaanagggaaagacantccttggccagcctagttttnagggtgaacgaaaggtcnttntcactgcntcctctagtcatttgcttcttcgntaattaacacatcttgagcacctgcnatgttccaggaacaggagatggcancgtgcaagataaagtccctgacttctagagactgcatgttagtggcaatcggcgtntacccggccttnaataaactactgaatgaaggaaaattctacctacaccagacacaattactggggtttctaaaatggaattattcccccggccccntgcatccagcagcctgntgcagggaaactcctccnaaaggcttgtaaggcaaggaanccgggacaatggcntggctatttaagcttncaacaagatggttacccctaagtncctaattccctaacaccaagggggccctttaccaggaaaccaaaaccaggttaaaaaaccccaaagttgggnaaaaagccatttgccanccggggccnttttaaaaaaaacctttnaaaaacctttcccttttaaaactttaccttcaagntaaaantttaaggggaatgggnccaanttttttaaccanccccaaaaaaaanttnggnaattttttttcccnaaattttttnaanttccccaaatttnggaaaang

SEQ ID NO: 554 - DNA, 766 bp, Homo sapiens
  misc_feature (1)...(766): n = A,T,C or G
tatcaatgntatgtntggtctnttcgaaaganctagncggntcgaattcggcacgagccaacacccagttctnactctgtcatccaggctggtgtgcagtggtgcaatgtgggcttactgcagccttgacctccaggacaagtgatctcccacctnagcctccggaatagctgggactacagntcaacaacgcccctctgaaagtaggactcttggaaatgaaccttgttgggagtaaagctgaaccttcacctctcctttccaggattctactccattcatacggcctcacactgaattaatgtttntagcagccacatcacttngttacccaattgatctagtagtaaagtcttcccatctnttcatgtaaaaaaaaaaannnaaaangggnnaggaaccntnangntnnnaanaaaaaaaaaaancaggnggngngcnttttttaacctataacctgntttnaggcctttccccangtttntccnaancnnggttantaggggccnaaagctaaccgnatttttgntcccntnaggttaggccngaaattaaccngggtttaaagaacncattgantaaagccttgcctnggccaattccgggaaaagggaanagcctccttgttttacanattgggaaaaattggccccaangggggttaaccangtttgcccnttaataactnaaanggatttttgncaaaacctggttccaaggntttaancccaanccttttnaaanntnggncnctttggatgnaann

SEQ ID NO: 555 - DNA, 770 bp, Homo sapiens
  misc_feature (1)...(770): n = A,T,C or G
gttatccnatgngcgtntgtngnnnncnctaanananttggctngncgctgggccttgcttctctgagaaaactttggtcacacntccaaagccagggtgggtgcctccntgnaggagggggctttcctggttggtggcncagnaggagtccaggctttgtaccgtggacaccatgggctatggcaacaccttcctaaccatccttccatgaggacctcggnaganagtggacatgaaaccctttgtgctctgaancattcaacagaagctttctggttctgtgcctatttctttggcacttgancgtgtttgcaggttcattacncacatgatgaaagctctggcccatagcactagaattcatgttttnagggtttgtgagtgtgacaggtgctatggtttggatgtggtttgtttccaccaaaactcttgcttgaagtttaactgccagcatggcaattgttggnaggtggggcctaccgggaggtgattgggtcatgggggcttgaaccctccggaatagattacngctgcctcctganaaagttctacctgtcatgggggctggatcagtcaacattgannantggggttgttataaagcaagactnactccttatgcaccgtttntttgcatatgcccctctgggggnancttctttggctgctaacatttttggacccaacccaatgggccttnacccagaaanccggaacaaaatgccnnnngccattcctttnngganctttccaacttnccanaaataat

SEQ ID NO: 556 - DNA, 756 bp, Homo sapiens
  misc_feature (1)...(756): n = A,T,C or G
gtngtcnatganatgtcttgcctnncgaagaacnaggcgnntcggtagaacagaaaatgagcatccgatttcttcactaaaggagaccaaactggttccttgcggcctagtnttnaaganctggancttgaaagtcctccttntaccaactccacntccaccccntnattcccnttntcccaaagtnctactgntgttgcntgacanccccaaatntgtnctgtcaacacaaacctgcctttggngtataaacagggcnttacagaatggtncaccctatatatttctgttcagtatccattcactagttcttcattaataaatatcatcttccccattctgctgctgaatgccacacatccatccagtctgagaaagtgagagaggcaatcatgccaagaacaagccagcaaagctctttcaccagatgtagactgtagccctgctgccttccctccagcgagtctgccagcatgcttcttcatccttttaatatgtcctttgcttcctacttccctgncttccaacatactgtcacttactctggcagtcttctgcttttcattaagcctcaaaatctcctctgtctacttggcaccacaagctatgtcctatatatgnatttctggacttggcanggatagttcaaggggtcttggcaagtttttatttaccttcattatttaaaangggccttttggggatgttggcctntttaaggagcctttttggggaaatcaatacttctcttaanaa

SEQ ID NO: 557 - DNA, 742 bp, Homo sapiens
  misc_feature (1)...(742): n = A,T,C or G
tcgtcnaaannnatgtcctggctatccgcaggatccaggcggntcgaattcggcacgagtgatttttttggtttttttttttgntnttgncaaaagcttantcntttcanttaaaantgccactantttgactttttaagtaaaaantgtagggggttttaaanctactttcctnctnccaaaaantcagaaagtttctanctttntaaattgggaaagcaagcantgttttaaaancactgaaggaatctctttnttcgngnccttttgttaaactcggtttaagctgtagaccttntttaaantaaaatttaccacagaacaggaaatagaanctgtggaagactcgaaatacacctttgtncttctctgttcttcacctgctctctcgctgtctctacacacacacacacaaacacacacacacctatatttgcattaaaaatgggtagtaaaagcagtgaagggcaaacagaaggtccattncatcaagtaagaggttgaatataaactggaccaagtcttaattttttatttccttcattcggatncgtttactaatttctttgctagctttaagacttttaaaacattctttggccctgggagggagttgtttacccctaaacttggagaatcctggccctagaataaatgttccttttaaacccccanggccggaaaattgaatncngctgtgccaaaaaggaaaaaannnaaaaaaaaactcgnggcctntana

SEQ ID NO: 558 - DNA, 730 bp, Homo sapiens
  misc_feature (1)...(730): n = A,T,C or G
gggtcnntaatntnnagcntgtnaaacccctgagncttncgggncgttcacaaagaaacatttaatagggacttncaancaaataattntcggtttntcaggtggcagcaagacaagatggtggatccccatgccattacctgctagactcagggttnatatactgtagtggaaaggtgattccgaaggaatgttgtaagacaattgaagtgcagtancatcaaagttatttgacctaagggcaggagttncagtaagtatccacttttatncaagaaacantagataaactggaaatcttggagcccttcctggaactggggttaatgagaagtcaacatggtggattancatggaagatggagttgcttagtctcccattcaagatggagtttctttagcctccattgatagggagtntttaacaaaancangaaataagtctttgatccattgaatctctaagagtgagcccttgatgactcaggtttaaacagtnctgagacaatttaggagatagttttgaagntcaatttgaattgtaaaaggtcaggattttttaactttttcacatctttgaanaaaagcccatagagcgcaagttttcagcaaganctggaaancnatattnctatggaattaaatagctcctcagggcaatcaattnggcctggganaacataatgcttcaanggctgangnaatctggaatttctatgggatttcttca

SEQ ID NO: 559 - DNA, 743 bp, Homo sapiens
  misc_feature (1)...(743): n = A,T,C or G
gttagtctataangtnngntatgtactngccctttccgnnggatcccntcgnttcgaattcggcacgagaggaaacacccccttataaaaccatcatntcaggctgggtgatctgacagagctagacactgtcaaacaaacaaacaaacaaacaaaaaaaccccatcacatctcatgagacttatttactatcatgagagcagctcaggaaacacccactcccgtgattcagttacatcccactgggtctgtcccacaaattgtgggagctacaattcaagatgaggtttgggtggggacacagccaaaccctatcaccatgtaaaataatatctaatttgtagagattaaagaacaagataacttaaatcttggatgtaagttaagagagtggtggtcagagttaaatcattttaaggttcatttattgtctggacaagaataaaattttgattatcaggaaatacaagtaaaaccacagggagacattgnttatatccaaattgtcaaaaattacaaagtcttataataccaagttttgctganggtgtggagcaacagaaacttttgttcactggtgggtatataaattgaataatttcagcttggacattacctagcaaaattgaaggctgtatacgtacatacctaccaatctagcaattcacttctagatattaagtcttgaaaaactcacatgtttccagagacgtgttaaaaggtggttaaatcattntgngaat

SEQ ID NO: 560 - DNA, 833 bp, Homo sapiens
  misc_feature (1)...(833): n = A,T,C or G
atccngttctntannnngtctngttctttctncacgatcnnntgcgattcgaattcggcacgaggggtcctggtgggagttccatccagcagtgagtgcattttttccccagagcagttaagggtcttattaaaagccaccactttgctgaggcctgtacaggccttgggggtttggggaagagaantaaggcaggcacttgtcccttcagggagggacttgtccntactgggaggtttggggttgaccttggctccagcagagatacccagcctggcntggaagggcaggtcttgagcttacgcttgactgcaagggcaagctgcaggcctcttctgccttcccctgcattcaccaaggacaagtaggaccaagaagtcaagggaaaagtgccaagatagatctattcccatttctttcttccacctggagaattcctgagctatgcttcaaacctcttttgggccagggaaagactgggggacattttttagtcaaggatgctttaagaaagtaaattcctgcttgggggcccaggccttctttttcaagggcttgcttgtgaatgcccaaccaaaaaaaaggggcccccaaggcccaatcccttacttcctnggtccccccaaaaagggatnccaanttggggaattgggaaaacttgggcanncacccnaancccactttggtagganttnaccaacccaaccaacccaaaaccancccacccaaattnaaaaaaaggccaaaaccaccaaccaaccnaaacccnnannnnnnnnnnannnnnnnnnnnaaaaaaactttgangccttttaaaaactntttngngnggn

SEQ ID NO: 561 - DNA, 773 bp, Homo sapiens
  misc_feature (1)...(773): n = A,T,C or G
tagtctaatgtnnnaaantnngcnctngttctttctgcaggatcccatcgattcgaattcggcacgaggaagaggaggctgtgtatgaggaacctccagagcaggagaccttctacgagcagcccccactggtgcagcagcaaggtgctggctctgagcacattgaccaccacattcagggccaggggctcagtgggcaagggctctgtgcccgtgccctgtacgactaccaggcagccgacgacacagagatctcctttgaccccgagaacctcatcacgggcatcgaggtgatcgacgaagctggtggcgtggctatggccggatggccattttggcatgttccctgccaactacgttggagctcattgagtgangctganggcacatcttgcccttccctctnaacatggcttccttattgctggaagaagaagcctgggaattgacattcagcactcttncaggaataggacccccagtgangatgaagcctcagggcttccttccggcttggcagactaacctgtcaccccaaatgcagcaatggcctggtgattnccacacatnctttcttgcattcccccgaccttccagacagctttggctcttgcccctgacaggatacttgagccnagcccttgcctgtnggccaaaccctgaattgggccacttgccaaacttgcnggggaaagggttccttgaaacaagggggccatttttggggaaggcttcttggcttggccttttggcatttnaatttggcctttttt

SEQ ID NO: 562 - DNA, 655 bp, Homo sapiens
  misc_feature (1)...(655): n = A,T,C or G
nnatanacattaangnnagangntgagnanttnccntcgctctntgannanaaggcgncgcgaattcggcacgaggccaccggtctcttcctaatctgcacattntattttgggtatttctgggcgggcagttcctttgcatgtttcgggagaggtttgttgatttggggcttatatgtcaggcctttggtttgcgtcttattttaggggttgtttgggggcctgggtggtcggcctcacatgggaaggggatgggtagtggatggggtttctgtcgnatcttgnggccggtgattttgctnncgnnctgtttcacattcttccccctccacaagccaaatcgttcatttggntncactgtgtggactgtctgagcttgccctgccagaaaaatttggggctaggcacccaggtgcanactttggaagaagcantccacctgtgggtaccgcatctcgtgngtcccactggcaggctgaacctacttgaacatggaaacagcatgcccatatggcaaaggggccnnnacnnnngnnnaaatnnannannnncngacanncnncnnaatcangannntcnacannnatcnnannnnancnnnncaantacnncnaaaacacaccnnccanaannnnnaannnnnnnncannnnnac

SEQ ID NO: 563 - DNA, 738 bp, Homo sapiens
  misc_feature (1)...(738): n = A,T,C or G
tnntaatgctggaattcctnatncttgggctactcgttctttctncaggatcccntgcgattcgcagaaaagagtatagtaggggatgaccaaggtcaaagtgggtaaagaagactcatcatccactgagtttgtagaaaaacggagagcagctcttgaaaggtatcttcaaagaacagtaaaacatccaactttactacaggatcctgatttaaggcagttcttggaaagttcagagctgcctagagcagttaatacacaggctctgagtggagcaggaatattgaggatggtgaacaaggctgccgacgctgtcaacaaaatgacaatcaagatgaatgaatcggatgcatggtttgaagaaaagcagcagcaatttgagaatctggatcagcaacttaggaaacttcatgtcagtgttgaagccttggtctgtcatagaaaagaactttcagccaacacagctgcctttgctaaaagtgctgccatgttaggtaattctgaggatcatactgctttatctagagctttgtctcaacttgcagaggttgaggagaagatagacccagttccatcaagaacaagcttttgctgacttttatatgttttcagaactacttaatgactacattcgcttattgctgcagtgaaaagngtgtttgccatcgatgaatgctgcagaaatgggaagatctcaaattctttgctcaaaaacgtgaacttaaccaaaatgatggt

SEQ ID NO: 564 - DNA, 798 bp, Homo sapiens
  misc_feature (1)...(798): n = A,T,C or G
nggggngtctaatgctgcncnnatcnanncanggnnctcgctctngctcnacnnanaaggcgntgngtgtgccaccacacccagctcattattattattattattattattattttgagacgaagtttcactcttatcccccaggctggagtgcaatggtgcgatactggctcactgcaacctctgcctcctgggttcaagcggttctcctgccttggcaggcacctgtagtgtcagctactcgaagctgaggtgggagaatcgcttgaacctggggggcggagattgcaatggtgtggtctcggctcactgcactcgagcctggcgacagagcaagactctgtctcaaaaaaaaaaaaaaaaaaaactcgagccntnnaactattngngaggtcgtattacgtagatccagacattgataagatccattgatgaagtttgggccaaaccncaacttgaatgcnnngaaaaaaagcttaattgggaaaatttgggaatgcctatngctttatttggaaccctttntaagctgcaantaaaacaagttaancaccncccaattggcntccattttaatgtttncagggttnaggggggaaggttttgggaaggttttttnaaattcncgggccnnggggncccaatgctttggggccccgggtncccaannttttgggncccttttaangggngggnttanattggccccccttgggggnaaaancgnggnanatacctnggtcccctgtgnanaaatnggnttcccnttacaaaatttcccacnnanatttnngnncc

SEQ ID NO: 565 - DNA, 744 bp, Homo sapiens
  misc_feature (1)...(744): n = A,T,C or G
ttntnngtttnaatnntcnnggnntcgntctnnctcnaannanaataggtttggcgaattcggcacgagcatgctggccagcatccctgcctgtgcaagctctggatgagctgtgtgcccctgccacncacacccngcactccctgccagcctggcctcagggcctctgatccatgtgcactggagtggtgatgactgacagggccactggggcatttncacgttaacagcagctgccactggcaaaagaagtgactcgccaatggtggcatctcagatgtgggcccaggagtctggggagctactttgaacagggctatccattcattgtcccaccaaaggctatggagcccacccaccatgtgctggagtagtcaagggaaataagacactctccttgtccttgttaactcaatcaacaagcatttgcagagcaccgcctatatgccggcgctgtccgaagtgctgaagatacagcaatgagctaagtaagcactgacttcgtagaaaaccataacatcggccatctttggaaaagagaaaaacaatggagttacttatttaaaaaaaaaagaaagaaagttatctcttccanganaggctagaagtacttttctgctttttggccagtgcccantggaatgcctggtttgggggaagaagaagggactgggttaactgtggtgcttttgttgtaaaaaggcanctggcctttgtacttgaggagaaanatggagccttggg

SEQ ID NO: 566 - DNA, 756 bp, Homo sapiens
  misc_feature (1)...(756): n = A,T,C or G
gnagtnntattgatttntctccgtgaatcgttctnnctnnannanaagtgngttnngccgctggctatgtggacgctggggcagagccaggccggagtcgaatgatcagccaggaagagtttgccaggcagctacagctctctgatcctcagacggtggctggtgcctttggctacttccagcaggataccaagggtttggtggacttccgagatgtggcccttgcactagcagctctggatgggggcaggagcctggaagagctaactcgtctggcctttgaggtaatggggggtggcggtggtggggggtgcttantggctatgctcaccccgctncattangcctattttggtctgctgtttccaaatgcttctanatctaggcatttggtatccaacctattgccacantgcctanaactncanacccccngccnctatgntnanacctacttggcacaagaacaanngnanacnttgnnnatatnccanaangnnnaanattacanantnttataataccaattnntnttganggtgttnnnnncanaaacntttgntnacngnnnnnnntatnaatnnataattnnnnntttgnnancannanctatgnnnaattaaangnntntntncnnnncnnnacnnnnannnnnnttannnanttncnnttnnnntnnnnnnnnnnnnttnaanaanntnnnnnttnatnnnannnncnnctnnaangtntntttnnnnnnatnnnnnnnnnncg

SEQ ID NO: 567 - DNA, 746 bp, Homo sapiens
  misc_feature (1)...(746): n = A,T,C or G
gnntgtnnttnncnnannnnanganagagntactcgctctntctctacgatanantgngttncgaattcggcacgagatttcctccagtcctgggccccatccttnagggccttcccagccagccagcaggagaggcaagaactgggggaacacaggaacctaggggaggaggggagcgctgggcatcctcaggctggcggccaagcctgcccctggaggcactagaggagggcatctgtctgtgggagcccagagctgcagggaggaggaggagggaggtatctggtgtgagcgttgcccctgcgacatttgggaccacacaggtgggcttccttattccctgacaaagcctctgtttccagctcttccgccctctctggatgagggaacagaagtggaggaaacaaaagaagcagcagcacgcacagtcctgtcgctgggtgcggagacagcctggcaaagtcccactcagccatggcctgatgcangccccagccctnctttcttgggtgtcaaatgactgtgtcctggacatctgatgcaccacctgccctgcctgttgcaaacgtgatgctcccggatggaatggagaaactaggagactgggacaagcaaaangctgcaaacaacccagaacccattcttagaanactggagaaatgattgaggaatcattggcaccgtggncctgtgcttcatnacaaacacctttnagaacaacttgggattgaaaaaccaagacant

SEQ ID NO: 568 - DNA, 738 bp, Homo sapiens
  misc_feature (1)...(738): n = A,T,C or G
gnnnntngtngttcttanngttnggatctcgttctttctncacgatcncntcgattcggtctgggcagcctacgctttccggataaaaatggcagaatgaaagaaattatgagtggaactagagaataggaaagacatgaaccaacgcccaaaatgagaaagaaggacatataaagaaaaagacaaatacaagtgaaaaaaatagactaatggattaacgtccctgtcgtgtgacattttctgctatggaaatgatattagacaaaaagcacttcaagtggttttcttatttgagttcaaaatgggtcataacgcagcagagataacttgaaacatgaacagcgcatttggcccaggaactactaacgaacatacagggcagctgtgattcaagaagttttgcaaagcagactagagccttgaatatgaggaacacagtggccagccattggatgcttcacttcttgaagcatcttgacagctttttgcaggtgaaatgcttncacaccagcaggatgcagaaaaatgctttccaagagtttgttgaatncagaacatggatgtttatgctgcaggaattaacaaatttatttctcgttggcaaaaaagtgttgattgnaatgggtcctatttgattaataaagatgtgtttgagcctaaaaaaaaaaannnnnnnnnnnnnnnnnnnnnnnnnnnnnnnnnnnnnnnnnnnnnnnnnnnnnnnnnnnnnnnnnnnat

SEQ ID NO: 569 - DNA, 753 bp, Homo sapiens
  misc_feature (1)...(753): n = A,T,C or G
gtttntgantntgattcttatgcttngnctaatgctttntctnnangatcccnncgattcgctggaggagaggagctcagagttctacagagtctttnctgaacaatatcagaaagctgctgaagaggtggaagcaaagttcaagcgatatgagtctcatccagtctgtgctgatctgcaggccaaaattcttcagtgttaccgtgagaacacccaccagaccctcaaatgctccgctctggccacccagtatatgcactgtgtcaatcatgccaaacagagcatgcttgagaagggaggataaaaactttcagaatgagcaaaacaccatcaacgttaattccagagatggaacattttttttcctagtgagaaaacaacccatttgaagagaagaccctaatgagaagaccctaaagagagacatcaagaatggattcagcagaatcatttcacgttttgaacagcagcagtttgaanggccaaagcctttgatcagggatcccgtcattaaaggacactcttgagtattagtaaaccctcttatgatgattaaaagagaagggcagccctnttcacctttttggtctttctattcaacttgcctgaccataaaatggttctcttctgnacaaagccccatcatttggtgaacctcacccttaacaaagtaggattggggttggggggcttaattaattggaatggggccaaggagaagagcccgaaaccttagatnccangggnanaagt

SEQ ID NO: 570 - DNA, 832 bp, Homo sapiens
  misc_feature (1)...(832): n = A,T,C or G
tnatnaataaggtttganttcttatgcttnccaanngcttggacctanntanccangcggtgcgaattcggcacgagccaggccccaataatctgggnttnaaactttgaggaaatgccagtgacttattccagagtgcctcagttaggggaacttctctgtaaagaaccctgggtattgagcaaaaaccttattatcgttaatgacctataattggaagcttcctgcctttttctttggttgctcctgtggaaaatactgaaaagattactttgttttattttgttgtctttttataaaaggggaggtggagagaccccttcagagcagggattgtgccgggagagtgcctctgactttgggacatttcatccacagaaatttncaagccaatggtttcttttgggttttgggtttttatgtttgntttttgggggtttggaaaaacatgcatttttaccgtgcacgtaaaattggtcanagaaaaagggagcccagaaaangcagcanatgggccatgcccctttgctgggttttccttttcttttgggactgtnaaggggaaatgggtttttanaaggtgaaggtttggtcctgttggaaggaaaagaantgtctctgttnggggggacaanaaggnacccttgggggaggtccattcgcaatggtncctaccaaaacnnggntctttaanaacaccngggcctttgncccaggnaaaaaaccctgggcccctttaanaaactttggnangggaaccccggaaaacccccttgggccttnccaaatcttttttcccaaagncncccccggggggcccaaaaaaaaacct

SEQ ID NO: 571 - DNA, 748 bp, Homo sapiens
  misc_feature (1)...(748): n = A,T,C or G
agtnttaatnntggacttctaanganttnggctnntcgnttggaannnnncagtnctctannagcccatcgatgcgaattcggcacgaggctaggattacaggtgtgagccaccatgcccagccacttatctttaaaggattaagtttatgtttcctactatgggaaaccatcccaccccaaacttgatgaccgcattatgtgcttttatagaacatggcacttctccaggatagcatttattctgttttgtaagtgtgaatgtaattaccctacacacagcatacacataatcttcatattctttgccttgtcttgtgaaggcaagggccatgtctatcttattcgtcattagattcccacatccaacatagtcctggggacagcaccaatgcacttttggtgcataagcaaatagtgcatttatagctcttacctacaatatctgatagactaatcaaatatagtaggttatctgggcctttttgattcatgtctctagcttaactttcatttttttcttatttggtatctctcactttgccttttgatatactcttacagtttcgctcactgagtaaaagaaaatntaaacagcaagaagtaaacttgtgttttatggatttngataacatcttctaaaagaccccccaagattgttgatgtctaaaaaaattaaagggccttcaactcataataatacttaatagttcttaaaatattacaaactgattggaacattgcctaac

SEQ ID NO: 572 - DNA, 755 bp, Homo sapiens
  misc_feature (1)...(755): n = A,T,C or G
agtcttattannnngttctaatcctttcttaangagnntaggctactcgtnctttctgcaggtatcccntgcgatncgaattcggcacgaggctgagcacctttggaaacaacatttaagggaatgtgagcacaatgcataatgtctttaaaaagcatgttgtgatgtacacattttgtaattaccttttttgttgttttgtagcaaccatttgtaaaacattccaaataattccacagtcctgaagcagcaatcgaatccctttctcacttttggaaggtgacttttcaccttaatgcatattcccctctccatagaggagaggaaaaggtgtaggcctgccttaccgagagccaaacagagcccagggagactccgctgtgggaaacctcattgttctgtacaaagtactagctaaaccagaaaggtgattccaggaggagttagccaaacaacancaaaaacaaaaaatgtgctgttcaagttttcagctttaagatatctttggataatgttatttctatctttatttttttcattanaagttaccanattaagatggtaagacctctgagaccaaaattttgtcccatctctaccccctnacaactgcttacagaatggatcatgtcccccttatgttgaggtgaccacttaattgctttnctgcctccttgaaagaaagaaaagaaagaagactgtgtttttgccactgatttaaccatgtgaaactcatctnattacccttttctngg

SEQ ID NO: 573 - DNA, 743 bp, Homo sapiens
  misc_feature (1)...(743): n = A,T,C or G
cangtctaatgctggctctnatcggttcttnnnantnaagntactcgttctttctncangnatcnnntgcgntncgctcacacagcatgtgtcagatccatggggtaggagtcggccagagacttggtaacagacagattgctggatcccacccctagactctctgattcagttagtttggggtaaggcgcaagactgaatttttcacaagtttcccagtggtgctgatacttctggtccaggaacttagtggggagagaacgactaatctagaccatttcacttcacattctgagcttcttgtcactgtcacactgcatccttttaacaatgcattccctatcctattgcaatactgacatctcatcaatattttaaaacatgcgttttcagaaacaatattttatatcaaatactcacttttagtaatatttctgcaattttgccctatggatctgagatctaacaaatactattctggacatgggctacaacagttgaggctggaagtaaaaatgttaaaccctgctgaccacgttattttaaagtgtattttagttaagaataatatggcttaggagcagggctaaacagtagcagtcacatggggaatgatactttgcttttgcacataaaatgtcctgaagggaaaaaataaagcagaaaattnncagatgaactgaaaatctgtacaaatgttgggctgaatactgccagcgttgangtgtaggaaaatgaaccnt

SEQ ID NO: 574 - DNA, 737 bp, Homo sapiens
  misc_feature (1)...(737): n = A,T,C or G
ccgtctaatgctggnttctaatcgctttcttaangctcnngggctcgntctcnctncacgcagcccggcggtgcgaattcggcacgaggggattacaggcatgacccaccgcgcccagcctgtnatttcttatactntgtattttggncttgtattatgcttctgatacgctataattatttatgtccatgtncntttcttcaatagactgtgaactcttcgaatgtnggactcctagagctagatnctcnattattnnntattaaattgaatgacttgnaactacagatcctttatttaaacttcccaaatttctgctttatctaggcnactctttaaattcttttatctcatgtagatttcanaggctgaaataattgagatttttagtttgaagaaaagagaactgnggatttaatggcnttattattatatttttaatggctgtttgggagtnaggttgcagacattggtcactttcctcctaaatncttaaatatttcctaaaaacaggncattctttnttttnttatggagtctggctctggcntccaggctggantgccgnggcccatcttggcttactgcagctccccttcccgattcncgctggtctcctgnctngctgctcgggaggctnaggccngggaatcgttgaccccggaggcggaggttncnanagcctnnacgggccctnggnctcccggctgggtacnngaccggacctccgnctgnat

SEQ ID NO: 575 - DNA, 766 bp, Homo sapiens
  misc_feature (1)...(766): n = A,T,C or G
gnagttnaaaagcggnttttantcctctcnaatcngnttgggctactngctctttctgnaggnatcccatcgattcgaattcggcacgagctttctccctctgtgcctcctgcttcctttctctctcctgcctctcctctgctccccatcccactttctcatctgcctccttttctcacttctgtcagtctgtaagctttgataacctgcttaatactccaaagtgtgagttcctctgatctcttgattccttagttctaatctcacgttttgtttttaagagatggagtctctcactctgtggcccaggctggagtgcagtggcatgatcatagctcattgcatccttgaaatcctgggctcaggtgatcctnccgcctgagcctcctgagtatctgggactacagatgcgtgccaccaagcctggctaattttgtctcatgtcttctaaaaattattttgtgaagccccttcacaaaaaaccttaanggaaatctgatggtgctcaggaatctaactctccctaaaccatcctcttttaactgcttctaaaatatctctggtggcctttcttagcctttttctggttcattcaatgcttcaaagcgctttttgnttctaagttgagtnctttgggggtttgacaggtagtgacgtgtagttttgacactgttaacttgttnaatacagtgaaaangtttgtgaagtgaaaaatgcttganaaagaatggnaatgcctttntacaaataaaagtnttgttaaaat

SEQ ID NO: 576 - DNA, 761 bp, Homo sapiens
  misc_feature (1)...(761): n = A,T,C or G
ggggtnnnnagngnnttgancccctttcttattatcaaggngctngcnctnnctnnannnancacaggcgntgngaattcggcacgagaagataacctcttaatgcattcatgttgtatatgaaggaaatgagagcaaaggtcgtagctgagtgcacgttgaaagaaagcgcggccatcaaccagatccttgggcngaggtggcatgcactgtccagtagtatttattgctttagagattgcttgtcgtacctgtatgtcgtccctttttaaatatgttttcctttttcttgaaactgtataaagtttttttcccccttagcataagcatcttatatataacaactcatttgtacaaggtttttaagtttatatataaaatgtgtatatatatttttgnttcccctttttgactttttttttctgtatgaaacccagatgtcaccaaatggacattaatagttgcattaaggatcagtagcattaacaaaagttgctttaaaagccattatgtaaaacaagacttgaaaatgagtgagggaattttagcgacactgtctgagcacagtgggaaccatcttcgtttcccctttgaactccaantgggatgccctaccctggcgccccttaggaccccggactggcccgngtacaaaactttaccgtgccaaaattcttaagtgaatttacctttctncctctttttgaagctngaaatttttggtcatcangntttgcttgtgatngtacatanggtngaan

SEQ ID NO: 577 - DNA, 803 bp, Homo sapiens
  misc_feature (1)...(803): n = A,T,C or G
gggtngttnnnnngtggnnttnttnnnngtttctaatnntcgnggngntcganctnnctcnananagaataggtttgngaattcggcacgaggtctcccgcccggcgcccccagtgttttctgagggcggaaatggccaattcgggcctgcagttgctgggcttctccatggccctgctgggctgggtggggtctggtggcctgcaccgncatcccgcagtggcagatgagctcctatgcgggtgacaacatcatcacggtccagccatgtacaangggctgtggatggactgcgtcacgcagcctctagaactatagtgagtcgtattacgtagatccagacatgataagatcattgatgagtttggacaaaccacaactagaatgcagtgaaaaaaatgctttatttgtgaaatttgtgatgctattgctttatttgtaaccattataagctgcaataaacaaagttaacaacaacaattgcattcattttatgttcaagttcagggggaggtgttggaggttttttaaatnnncggccncngcgccaatgcattgggccccgtacccacttttggtncctttaantgaagggtttaatttgccccnctntgccgtaattcatgggncatanncttgntttcctggngttgaaaattggntaatccccttcnacaaatttccnccacaatcatttaccaaaccccngggaggcctttnaaagnngtnaaaanccctgggggtggcccttaatttaagtggnnccttaactcncntttaantgccnttgcccttcactgcct

SEQ ID NO: 578 - DNA, 738 bp, Homo sapiens
  misc_feature (1)...(738): n = A,T,C or G
tcgtcccntngatcggggtaacgtccttncctatnaaanttctttcgggaaagcagaaaccaagctggcagaagcacagatagaagagctntcgtcagaaaacacaggaggaaggggaggagcgggctgagtcggagcaggaggcctacctgcgtgaggattgagggcctgagcacactgccctgtctccccactcagtggggaaagcaggggcagatgccaccctgcccagggttggcatgactgtctgtgcaccgagaagaggcggcagatcctgccctggccaatcaggcgagacgcctttgtgagctgtgagtgcctcctgtggtctcaggcttgcgctggacctggttcttagcccttgggcactgcaccctgtttaacatttcaccccactctgtacagctgctcttacccattttttttacctcacacccaaagcattttgcctacctgggtcagagagaggagtcctttttgtcatgcccttaagttcagcaactgtttaacctgttttcagtcttatttacgtcgtcaaaaatgatttagtacttgttccctctgttgggatgccagttgtggcaaggggaggggaacctgtccagtttgtaccatttctttgnatgtatttctgatgtgntctcttgatctgcccccactgtcctgtgaaggacagctnangncaaggagtgaaaaactttacttcttaaaaaaaaaaannnnnnnnnnnnnnnnnaa

SEQ ID NO: 579 - DNA, 758 bp, Homo sapiens
  misc_feature (1)...(758): n = A,T,C or G
gnngtgnctanctaaatnnttggntntaaacgtncnttctgcatnatccctnnttgacgaattnggcacgagacagagtcctgaaatatgcaaatgaagtaaattctgatgctggcgccttcaagaaacagcctaaaggacctgcctgatgtgcaagagctcatcactcaagtgcggtcagagaagtgctccctgcaggccgaagccatccttgatgcaaacgacgctcatcaaacagagaccttctcctcccaagtcaaagggacaaataagcctctgggttgaacggtttgagacattctgccttggaccttcccttgtcaccaaacaagccaaccttgtgcacttccaccaggctttcacccattccctgcaagccttggtcttttgacctggccctcaaccatgtggctttccaccccttgaggacaagttggaacagaagaccaagagtggcctcactggatacatcaanggcatctttggattcaggagctaaccaggctcttnctcgggggcgggggagattctgactcttaatctggattgtgagaaaaatccagcaagttccatgatatttaaatccaggtctgcattggcccggggcaagagtttaacatcttcgggccctgcatttcctacatcttggggtctgtacacgttcttaagcaagcgtgtcangagagcaccctgttggcttcttggtaaaatgtgtgcaaggtcatnctgtcttctgnaccttctggggaaaagggncc

SEQ ID NO: 580 - DNA, 816 bp, Homo sapiens
  misc_feature (1)...(816): n = A,T,C or G
tttctaaatngcttgggtttcnaaatcccttggttgacgccctcgcctaanntggcgtgnnantgcccncgattcgctgncaagtctggaantcatattggagcctgngtngactgaaaactcagcangagttgatgttaaagtcttgggtctgaaattngtngggcaggagattaggctggaaactcaggcagaatttctgtgttacaatcttgaggcataattcttctccaaaaaaatctccatttttttctcttaaagccttggatgagccttggatgattggatgaggactacccacattatctagggtaatctcctttgcttaaagtaaactcactgtgttaatcacatcaacaaaataccttcacagctacatgtagtgtttgaccaaacaactaggcaccatagcctagccacataaaattactatcattatactttgtcttatcacatacttctaccttggaagggatatttcccagttggtatagctacaaaacagaggcagatcatttagcctgcattngattngtantgaaaaataagcctttggtgngtttaaccactgaaaatgtttgcggcctattagtantngcacaacttatcctatnctggccaaacatagaatgctttcggtttgcaaggtaacangatcccctttacagntgtacnaaaaatnancnntaaaaaaactngagccctntagaacntnntagtggagtcgganttaacgttngancccagaccntggattanggatncattggatggagtttggacataccaccancttggaatggcnantgaaaaaaa

SEQ ID NO: 581 - DNA, 868 bp, Homo sapiens
  misc_feature (1)...(868): n = A,T,C or G
ccnnganncnnnccnnnnncnnacaaaancnnnnnnnannnnnnnnancnnnnnnnctcttcnaannctgctnacgcccanagcatgacccacgatcgaatcggcacgaggttgcaagcagccttggaatagtaactcttctcatttgtttgggatctggccaccaagtnccagaatgatacacggatcagngcanaagntcatcaggctctcggaccttagggctgntggagaagcttcagcagcagaactgatggtgaaggctcgtgttctccatcctcaactttctttgcttcgatcatacacaagaatacattnggaagggcaaaaaaatgaacactgtcgnncattgcagcccgngtttngtgacacagatgcacagtctgcttgtgaagaccttctctcaagtggcatttgggagtccatgccagancatggtgcttcatgagagactgacagctatcaggggttgnggcacttagngaggactctcctcccccagtgtgtgctgatgacacatcacacctgacaatagctngaagnctnctctgacccntnttactctgtagccaacataccacatgantttaaaacccnttctaaaatatccaancaatggggtcatacntggcccaaatgccagaantcnagagcctaataggacttccaatnattaactttnccaaanncgaaaaaagnagggcnttccnnttatggcaaaaaaatnaannnaaaagganatntggnatngttngccnaaaaaaaaagcccnntnngaaacctaatangaggaggtcccacttaaccggncgnanccccagaacantggaatacaggantaccnatnggantgaanatttggggancc

SEQ ID NO: 582 - DNA, 745 bp, Homo sapiens
  misc_feature (1)...(745): n = A,T,C or G
ttctgaataccttnttacncgccttcttcaggantttcaagacctaattcggcacgagaccctttctgccttctgtttgggacccagctggtgttctttggtttgctttcttcaggctctagggctgtgctatccaatacagtaaccacatgcggctgtttaaagttaagccaattaaaatcacataagattaaaaattccttcctcagttgcactaaccacgtttctagaggcgtcactgtatgtagttcatggctactgtactgacagcgagagcatgtccatctgttggacagcactattctagagaactaaactggcttaacgagtcacagcctcagctgtgctgggacgacccttgtctccctgggtaggaggggggggaatgggggaagggctgatgagaccccagctggggcctgttgtctgggacccttcctctnctganaagggaggcctggtggcttaacctgggcangtcnngtcttctctgaccccantggctgcngtgaaggggaaccacccttccttgcttgaccantggccattanctnccntnaccacttgnaacccanggtcccanctggctgggaccctnttntncccccaangncctttcccttgggctntnttggantgagcaccttctntgtnngcaccttttanaantgnnnnnntgntactgatttttttgntaaaaagannttaaaanctggnantttntnaaaaaaaannannaaaannn

SEQ ID NO: 583 - DNA, 748 bp, Homo sapiens
  misc_feature (1)...(748): n = A,T,C or G
gnttctaatncttggcctactcgcctntctncaggatcttatcgatncnaattcggcacgagatatggtatagttggaaataggttattgtgagttatttgtagtcatgtctttaatggcccttgcatggtgtctaacttctgcaataaatgatctgccagtcctagtgtctgggctttatgcaatttgttttcctttgtggatgaagtgggagtaagacttgttgctgtgaggatcagatgaagtggctaggatatggacacactttacttgaattggaaaacaagccatgtatccctaatctgcaaaatgtggcatgtcacacgtgtaatctctgaggtttagtttttgctcaagattgcaaaggtgacttgcttgatgctttctttgcttgagcacacatctcattcattaaatggtgtctccttttttgcacacaggatgcagaacataattgaccttttccaagtctacttagcagaaatgaaaatggaatcatataaatacagtattatactttaaaataaaaaggctgtacaaaagtttggctgacatagcttgcttctagtaatctgaatggcttatttaaataaagttggatctatggactcttcacagnctagatattatcctactggaagatgtgcctcgaaagctgttgaaccacngcaaaaaaacccttcagtcagcacgtgagaaaacctgcgagcccacatttcccccgggaccattctgaacatcctactgg

SEQ ID NO: 584 - DNA, 773 bp, Homo sapiens
  misc_feature (1)...(773): n = A,T,C or G
tttaatgcttgttacacgccttctgcaggatttatcgattcnaattcggcacgaggctatgtattgtgtcctaccatgaattcactccatgctagccacattggcctgtatggctattccttggacacacctaggatgttcttgcctcttagcttgcctacctttctctcatcatttgggcctcancgaggatatcatctcctcagagaagccttctgtgaccatgctatctaaaatactccagcacttcagtcaccctttatcccattactctgctttttcagaaacattggtgctccctgaaacatatttgtttacttgcttagtgtcttttctcccgcactaccatgtaagcttcttgagggttaagggaccttgttagggataaccactgtatccttagagtgtgacacatagtaggttctcaatacatatttttgaaactctaccctgatgcaaaagagatatcaaataattatagtttttgcattataaatggctttggtgaaatccctggcacaaaactaataataaaagaaataaacagataatgttgaagttctgggcctgcaaaacctaactcttttaaagcagtcccagtaaatgtgtcattgggatccataagactttgtgggaaagtcaacataattttattngggaaaaagcattgaaccttcaaaagtnaaaactttatnggnccaaaatctcaattactggggggccgttctttaagtcattttaaaccctttgangccnacagttttacaccaaat

SEQ ID NO: 585 - DNA, 745 bp, Homo sapiens
  misc_feature (1)...(745): n = A,T,C or G
ttcaatacntntttcnngccttttgcaggatcnctcgattcgatggaacatgagtggaagtgggcagtctttttctttccctatcagctgagtgaatgaagatttagagggcagcagagtcatgacatggatgacgttgggtctctggatggctaaatggaagacccgccccccaacgccactctacccccctgctttgaactatgctttgagaaatgagcttatgagaccactgagacttgggggctgtttgttcagcagttcacctacacttattaggaaaggttgacttcttgtactacgcctttccttaaatcatcttttgtataattctcagaacactgctggtttgggtggtctcacacatttctcacatccaaattttaaagatttcatgaatgttcattacagtggatttatttttctctttctgcttctcggcatgccctctcaatttgggagaaatctctaattggatgactttggtgggaccacaggagtgtaaggatcgtaattccctcacttcatcccctgcaaattaaagcctgggcacttaagactcactcaactgaatcttgatatgtgggactttanatcttaagcaaatgangcaaaagaaggaaaagacagttgagaaaatcaatctctgaagttcagcacttgatttccaccgtggaccggactcctgcanctttgcattngccttggttcctggccattttccnaacccgggttcctttttgan

SEQ ID NO: 586 - DNA, 749 bp, Homo sapiens
  misc_feature (1)...(749): n = A,T,C or G
tgttctaatactaggtntactcgccttttgcaggatctnatcgattcnaattcggcacgaggggtcctggtgggagtnncatncagcagnganngcattctttccncacancagtnaacggtcttattaanagccaccactttnctgangcctgtacaggccttgnnggttnggngaacagaaatnncgcaggcacttgtaccttcaagnanggacttgtgcctnactgnnagggttggcgttgaccttggctcnacngacatacccantctgacttnnaacgngcncgtctnagcttacgctagactgcacnnccaagnttgcangcctnttntgncttccctgcattnaccaatgacagtacgaccaacagtcaangaaaagtgccaagatatatctatcccatttcttctacacctgtanattcctnactatgctcaaactatgtggngcaangaanactggnngacatttttagtcaatgatgctgacaattaattactggtgnggccaggcatatnttcacggctgcttgtgatgccaacnaagaacgggccccagcccatccttactcctngnccccaaanagatccagtgngaatgggaagctgnnannaccaacccaactnntgatttaccaccaacnccaaanatcacgcatgnnnacagcaaaacaacaacncnatgcacttaacaagnanccnaaaantnaactcgngcctctaaaactattngggantcctttanct

SEQ ID NO: 587 - DNA, 783 bp, Homo sapiens
  misc_feature (1)...(783): n = A,T,C or G
gttctaatncttggcctactcgcctntctgcaggatcttntcgaccttattcggcacgagcccaaggcaagctgttaacaaaatcaacctgggccaatcatcaaagggttggacctaaggttgctatactcaatagaacaagcattttaaataaatttctcgtaagttgttgctttctttatgtggtgggtgtggctttaaagagcacaaaaccacaacaaatcaaagagtagctcgggcttgtcttttgctttatggctgagggtttgaaggatgattcatggacttgtgaatgccagccccagtcccggcttaggtctatctgccaataccaccagggccaacaaattcacgcaacaaattctctcattttttacagtttatcagttgcactcatagttattgtcataatcactccccacagtaacctgtaaggcatataaagtagctattttagtaagataaatgatattttatatatgttatgataagataaatcttatcattttaagaagaaactgagctcggagagatgaaatgacttcctcagttgctgctgtaataaaagtctactttttgctaaaaaaaaaaaannnaaatatnntntannattnnantaanaanaaaaacttcgagccnttttnaaactttnantggagtcnntttntcccgtaaaatccnnnactttggatnaanannccatttngatnaagtttttgggacaaaccccccaacttagaaattgcnntnggaaaaaaaantgcnttttattttgnggaaaan

SEQ ID NO: 588 - DNA, 771 bp, Homo sapiens
  misc_feature (1)...(771): n = A,T,C or G
tcttctaatgctggttacangccttctgcngatccctcgattcgaattcggcacgagatactttttaaaccttttttggcagctcagatggtgtaaattttaaaattttgtataggtatttcataacaaaaatatgtatttcttttttgttattttatcttgaaaacggtacatattttagtatttgtgcagaaaaacaagtcctaaagtatttgtttttatttgtaccatccacttgtgccttactgtatcctgtgtcatgtccaatcagttgtaaacaatggcatctttgaacagtgtgatgagaataggaatgtggtgttttaaagcagtgttgcattttaatcagtaatctacctggtggatttgtttttaaccaaaaagatgaattatcaatgatttgtaattatatcggttgattntttttgaaaagatgaaccaaaggatttgactgctaatattttattccttacacttttttctgaataagtctctcataatgagtgcagtgtcagactgtgcctactctgatggtatngtgccatttgtaaaatnanaataagagcagaaaaaacacaaanangagaacactggnttcagacattcantggggcaagttaaattatgggactgcaaaaataatggattttttattcaaagaaaagctttaaaaagttttattatccanatttacaacccactanttaagctaaataancctactttnaaaaatngnaaatggttnctatctttataangtgccaanttnan

SEQ ID NO: 589 - DNA, 844 bp, Homo sapiens
  misc_feature (1)...(844): n = A,T,C or G
tncactnnaatccttntntaaaaagccttctgcntgatcccatcgattcgaattcggcacgaggccagagcctagaggagagatcaaagacnttngccgaagtgaagcccattctgcaagcaactgggttcccatggcatgtggtggccttagaggaggtgttcagcctgccaccgtcggtgctttggtgctctgcccaggagctggtgggatccgagggggcctacaaggcggccgtggacagcttcctccagcagcagcatgtgctgggggccgggggtggtcctggcccgactcaaggggaggaacagccaccccagcccccgctggacccccagaacctggcaagaccgcctgcccctgcccagactgaggctctttcccaactgttctgctcaatgaggacactgactgccaaggaggagcttctgcagaccctgcggacccacctgatcctncacgtggcccgagcccacggctactccaaggtcatgactggggacagntgcacacgcttggctatcaagctcatgaccaacctgcnctgggtccaaagggccttcctggcctgggatacnggctttcttggatgaaccngnaccgggngaacgtnggtggtnggtgccggnncattgcctgggaaccaccacccccttnaaaangaangntcgnttatttctaacaaaacccggnccttgnttcntaccntnttccctntcttggnnnnttttnaanacncnannncccaattngnaanaacccnaaaangggnccctttgnaaaaaaanggggccnatatnntntntcanacccgnggnctttgaatnnggaaaangccnctnct

SEQ ID NO: 590 - DNA, 767 bp, Homo sapiens
  misc_feature (1)...(767): n = A,T,C or G
tctaatgcttggntctngccttttgcggatctttcgattcgnattcggcacgagagaacgttctcaggttgaccagctgctgaatatttctttaagggaggaagaacttagtanntcattgcagtgcatggataacaatcttctgcaagcccgtgcagcccttcagacagcttatgtggaagttcagaggctacttatgctcaagcagcagataactatggagatgagtgcactgaggacccatagaatacagattctacagggattacaagaaacatatgaaccttctgagcacccaggtttggcatagaaatggtaccccttgttcaaaatgaacaagaagccttagatttggatggggaacctgatctgtccagtctagaaggattccagtgggaaggtgtttccatttcctcgtcccctggcttggcaagaaagcgaagcctttctgagagcagcgtgatcatggacagagctccttctgtgtatagcttcttcagtgaggaangtacaggcaaagaaaatgagccccagcagatggtttcacctagtaactcattganggctggacagaaccagaaagcaaccatgcaccctcaaacaaggaagtnacacctcnggctggccttcccttccgaacaggtgaaaggggcttgaaaaatgttgctaccccaaaggcgacattnntggcaccaaattatccctcttgaccnntttaataccttttgattncatttnggcaaaagactttgnaccagccnnggaga

SEQ ID NO: 591 - DNA, 765 bp, Homo sapiens
  misc_feature (1)...(765): n = A,T,C or G
tctttgaatccttttgtaaaagccttttgcatgatccctcgattcgaattcggcacgagacttcttgtttgccttttttataaggaaatgttggagagttacatcattgctaatgtagaaatgttaagtggaaaaatatacagtttggtaaaataaactagattctacatttatttgtgggtttttttcccctcctttctttccacagcacttttgatatcaagcaagtggcttcctttttgagatattaaaaaaaaaaagaaaaggaaaaaagtaaatgaagcccaactacctaaccctttcttatttgtatttgttttagtattgtgaagttgtgttaaatagtactagctagaaatacaaatttctggttatcatttctcttccctgtggcacttgacattttaattgtcttaaagtttttgaagtcatcttctggccccttgagtactgccagaggcaaaagatgtttgtttcttattcattccacttttgtctcctgggatcccttctgtagcctaaagtatggctgggaaatggacttgagaagattggcttgaattangatcataatcatgtgtgatcccatcatgaattcattggaatntggggtncatgtaangcaatcnttctggtgtaaatcttcctttttttaatgnacatatanttttggaaaaaattttgaattaaccctgaaaatttttaaaaaagccctcttanaactattannggaggtcncattaccctagaatccanacattnant

SEQ ID NO: 592 - DNA, 757 bp, Homo sapiens
  misc_feature (1)...(757): n = A,T,C or G
tnttcnaanactngttctngncttttgcaggatcccatcgattcgccaaatctgcctagagattgagttcacagtgtatgttctgggggcgctggtgcagtcagcggtccagtctccagcctgcaggcgtgcacactggggtggacgatgggtggccccgcaggtgtacacatttgggtggccccggcccctataccccagtgttctctttgatccagtcccgaaacagagggagccttgtgtacacgcctncaaagtggagctgggaggtagaaggggaggacactggtggttctactgacccaactgggggcaaaggtttgaagacacagcctcccccgccagccccaagctgggccgaggcgcgtttgtgcatatctgcctcccctgtctctaaggagcagcgggaacggagcttcggggcctcctcagtgaaggtggtggggctgccggatctgggctgtggggcccttgggccacgctcttgaggaacccaggctcggaggaccctggaaaacagacgggtctgagactgaaattgttttaccagctcccaaggtggacttcantgtgtgtatttgtgtaaatgagtaaaacattttatttctttttaaaaaaaaaaaaaaaaaaactcgancctntanaactattagtgagtcctatttaccttagatncagacatgataagaatncattgatgaattttggacaaaccacaacttggaatgcantgaaaaaaaatgctttatttgtgnat

SEQ ID NO: 593 - DNA, 766 bp, Homo sapiens
  misc_feature (1)...(766): n = A,T,C or G
tcttgaatnctngttnntgcctttttcggatccctcgattcgaattcggcacgagagaacattggtgtgtgagtgttttttgatggtgcaggacccggaggtgctttccttgccaagaatagaaacatccagaatgctcctccccatcccccaatcccagacagcaattatgtcagccctgtaaggcattgcctgctcttgaccctttggcccatctttttatttttaaaaaattcccatgtcacagatgccctgtctatgcagagggtggcgtgggatgggtgaccactaagtttaggctggtgaaggtggtgagcccttctgaggccctgatagaactttccaggagttcatggtccgcggctccagcttctcactgtaaagttgtcatcctggcagaggcagccaatgcttttcattctagggggtagagatttatgctaatgagtgaatattgcaccactagtgactttctgtttaaagttcagctcttagaaaatggaatcttacctgacccctagtgaattatgtacataagcagggaatgtttccaactagatctccttcagaagagtccctgtgctggaataggtcactgaatcttatttggntttgtnaaacaaaagcttttgggtctcgtggggtgtgtgtgtgntttggngtgtgttgccccntntgccgtttcaaataaaaggtttggtaccaccttttcaaaaaaaaaaaatantntanntnanantnntntancntttnttnncnttanant

SEQ ID NO: 594 - DNA, 754 bp, Homo sapiens
  misc_feature (1)...(754): n = A,T,C or G
ttgnttaggatcccatcgattcgaattcggcacgagggaaggcagtgggaggagaggaccaagtctcaaactccagaagccccacctccctgagctcagctcctctgccaagccccctcagcgcgaagtcctcgtccagagaaggcaacggcgagaaacaaatccaacatcctgggctgctttttccttcccccactttttaaaagtttggtgtccaagtcacttgacaaacccagaccctaacaatgatattttgtgtagaattctgggatcaaaatataatttcaaaaataatatattttctgacatcccccaaaaaaaaaaanaaaaaaaactcgagcctctagaactatagtgagtcgtattacgtagatccagacatgataagatacattgatgagtttggacaaaccacaactagaatgcantgaaaaaaatgctttatttgtgaaattttgtgatgctattgctttatttgnaaccattataaagctgcaataaacaagttaacaacaacaattgcattcattttatgtttcaaggttcanggggaggtntgggangtttttttaattcngcnggcgcngcnccaatgcattggggccccggtnncccancttttggntccctttaagnngangggtaaantgncgcncttggcntaatctttgnncatnggttggnttnctgnggngnaaattggttttccnggnnanaatttccccncatnttangatcccnggnngntntaang

SEQ ID NO: 595 - DNA, 767 bp, Homo sapiens
  misc_feature (1)...(767): n = A,T,C or G
ggtttaatgctgttnnaanccttcttnancctttgtacagcatccctcgattcgaattcggcacgaggaacgcttccattttatacctgtgtctagttagtttctgcctatctatccaagaagcttttatcaagggtccaccatgtgccagccactgaagtagatataaatacaaggatgtgtaaggtatggatgatggtatacgaactgtcatcttactggatttgtccgctctgttaaagatacggttccgaaaactttttaaagccctagagagggctttaaggcaatgtagcatcatatatagaggcatnaacctgttcatatctttctatttaacagaactgtgcacctgggcacaagggtgtgcacaacaggatgtgtacagcagcactgttaaagtgtancacatccatactacangatcttatgcaactgttggaaagaatgaagcgatgctgcactgtggtcatgcagtgatctctaagacatattaactcgaaagcaaaaggtttaacaatgtatnacaaactgggctgcaattgactcgcgcctgtaatcccagcnctttgggaggcttgantaaggcggatcacctgangtcangagtttgagaccaaacctggccaatgttggccnaaaccnctgcttctactnaaactacnaaaaattaacctngggcntggttggctccgtgccttntaatcccngcttactcggcaatgcttgagngaangnanaattngctttgaacctnggggaggnng

SEQ ID NO: 596 - DNA, 743 bp, Homo sapiens
  misc_feature (1)...(743): n = A,T,C or G
tnttnaatnctnttttaatncttgctgcangatctttcgatgatcccatcgattcnctggtctcgaacacctgacctcaggtgatccattcgncttggcctctcgaagtgttgggattccaggcgtgagccactgcggccagcacatttccacttntagatcctactccataccacaggtttcatttaagangaaaganctanataaatgtgctcttntggataccccaccctgacagantgcattgttacacagntancatgggttgacactgcaanctggcctgtcagccatnggaggngtttanngaaaggcanatnatgtnactctgtgncagggngccatntgcttacccntnacctagcatanggggnttctacgggtgaccccnagcatatttctaggttacttatgggcagatttgtaagtgacaaaactccagctgatgctgggaatggggagagggcccttganggactttgtggntttgtgcttctggtttcctggccaaccccagggtcacttgtctggagcccagctgggcactaatgtctgccancgactatnttacagtgtataaatgattcctctatttggggagagatcttccaatccagaagagcccctnttggactgcctgggttaaatctgcatagcanaagtggttgatgagtcatctgaagaaattcagccccaacttnncaacctgcccttcctgnttcctttttaatggnggcctntgg

SEQ ID NO: 597 - DNA, 786 bp, Homo sapiens
  misc_feature (1)...(786): n = A,T,C or G
ngtttnnnccngtttttaatncnttgctactngctctttttgcaggatcccatcgattcgaattcggcacgaggacanaccgttgagaggacgtggaggcccnttagggggtntgcncngnanaggcagangtggccctgggaacagagttttatgacncttttnaccatanangaangngagaatttnaaagatatggtgggaatgacaaaatagcagncataactgaagacaacatgggtggatgtggagtttggnacctngggatcgngnaaagataccagtgatgtggagccaactgctccgatggaggaacccacagtggtggaggagttccantgcanccnggaagaggagtatccagcctaagttnctgactggatgtcaagaagaaacccaanttataanagatgactntanntgantggnnaaatctttcagatcannccagaccatancntgagtttaacatccgnaanccacaatccantgnnccttactaagccgtggtgattnacaagtcataaatccattanatgatgtggtnaaagatgcctatnatgaccnattctccatngttntccngaaacccgtcaattgacatcacatntcctnttggagattaaattttnggtnancntnccttcgtccttgggcattngaacncataagaatgcacccccnggntaggcccngtnnaaaggttnatgaaggccnttataanttttgnnnccccaancattaaantggctngattcccttaatnttttcctcccnaacccagnt

SEQ ID NO: 598 - DNA, 809 bp, Homo sapiens
  misc_feature (1)...(809): n = A,T,C or G
ngttttnnnncnnnttttctaatgcttgcttctcgttcctttgcaggatcccatcgattcgaattcggcacgaggacagaccgttgagaggacgtggaggcccgagagggggtatncncggcagaggcagaggtggccctgggaacagagtttttgacgcttttgaccagagaggaaagcgagaatttgaaagatatggtgggaatgacaaaatagcagtcagaactgaagacaacatgggtggatgtggagttcgaacctgnggatcgggtaaagataccagtgatgtggagccaactgcaccgatggaggaacccacagtggtggaggagtcccagggcaccccggaagaggagtctccagccaaagttcctgagttggaggtagaagaagaaacccaagttcaagagatgactttagatgagtggaaaaatcttcaagaacagaccagaccaaagcctgagtttaacatccggaaaccagaatccactgttcttccaaagccgtggtgattcacaagtcaaaatacatagatgatatggtaaaaagatgactatgaggaccattcccatgttttccggaaaaccccccattgacatcacattccaacttggagattaaattttgggtaacccttcctttgtncttgggccttngaacccntgaaggaaggcaccccnggtgaagggcccngggggaaagggattcanggnaaggggccantaanaaaccttttgggaccccccttaanccaataaaatttggtngaattgcnanggaatggtttgnccccccnaaaccccnaaant

SEQ ID NO: 599 - DNA, 759 bp, Homo sapiens
  misc_feature (1)...(759): n = A,T,C or G
tttntaatnctttttcnaatgctngcttcaggannntntgcangatccctcgattcgaattcggcacgagccaggttagctgctgaatcaaagcttcaaacagaagttaaagaaggaaaagaaacttcaagcaaattggaaaaagaaacttgtaagaaatcacaccctattctatatgtgtcttctaaatctactccagagacccagtgccctcaacagtaaagacttttctttaataagagtacggtgccacttgcctcaaaagttactatggtgcttaagattgtcttgatctgacatatatcaccttctgggttatttactcattgtgccaggacctggcattttcatgtgcctttgaccaagtgttcagaatttgcttgactctaacctggagagcttcttaagtgatgccccttcatggagcttctatgacagtgaataaactattaattgaaggaaaatgttataattaatgtatctatttgctgcattgtatatggattaaatgataaaaaacaagtaatctaccctcagagccatgtatttgagaatgcttcaatcatattttcctatgtaccttttttttataaacttagttttagactatgttgtaaaaatggggaaaggttgtaaactatgtngtaaaaaatngggaaatgtggctttaaaatatatncattatatttggttcaaggattttggcaggggntaaaggaancnatggttcaatctttgnatttatataccntgatttaa

SEQ ID NO: 600 - DNA, 769 bp, Homo sapiens
  misc_feature (1)...(769): n = A,T,C or G
ttttaatacntttttnaatncttgcttncgntcctttgcaggatcccatcgattcgaattcggcacgagagcaattccactcctagctccacccacaggtaattgaaagcaaagacgcaaacagatgcctgtgcaccaaagttcacggcagcatccttcgccatagtggcagcatccgtcgtcacagcggnatcatccttcatcatagcggcagcatccgtcgtcacagcggcagcatccttcgccacagcggcagcatctgtcgtcacagnggcagcatccttcgccaaagcggcagcatccttcgtcatagcggcagcatcctttgccatagcggcaaggtggaaaccctgtccatccactgaggcgtgcatagactaaacatggccagtccaggcactggaatccaggccgtanaacggngcccacngtcaaaaggaatgagaccctgatgcactgggcgacacagacgggcgacacagacttggagacatcatgctaagtgaaaagccaggcacacggagcggacggggtgatcctgctcacgtgatgtgtcccgaatgggcacnttcagaggggaagaanggagatggcgcttgacngtgnccgggacnggggttgggagcgaccggttgttggtttngggtttctttctngggtgaaggaaatgtttttgatattggggccgtttgggtgatntttgcattaccctttgaatatgcttanaacccnctagaaattgnnacactttttaaatngnttggaaatt

SEQ ID NO: 601 - DNA, 755 bp, Homo sapiens
  misc_feature (1)...(755): n = A,T,C or G
ntgtttaatactattttctaatacttgctttcgttctntttgcangatcccatcgattcnaattcggcacgaggagacagcagcccccagggaatgaagctgatgccagagtcagacccgaggaggaagaggagccactgatggagatgcggctccgggatgcgcctcagcacttntatgcagcaactgctgcagctggncctcaagtacctctttatccttggtattcagattctggcctgtgccttggcannctncatccttngnaggcatctcatggtctggaaagtgtttgcccctaagttcatatttgangctgtgggcttcattgnnagcancgnnggacttntnctgggcatagctttggtgatnagagtggatggtgctgtnanctnctggttcangcanctatttctggccagcagatgtannctatatctgtgattactggcacttggctacagagagtgctggataacagtgtagcctgcctgtacaggtactggatgatctgnaanacaggctcagcnatactcttactatcatgcaaccaggggccggttgacatctaagacttgnttattctatagttcnaggancacaatggaatatgatcccttaactcctgatttgggatcatctgaaggaccaaggnnggcagtcttcgaagtggaataaaatagccccggcngtngtgacttgcacctatattcccagacttttgggaggcnaannttngaaggattgnttgccct

SEQ ID NO: 602 - DNA, 773 bp, Homo sapiens
  misc_feature (1)...(773): n = A,T,C or G
nttgtaatagctggtttctaaannntngntttcaacccctttgcatgatnccatcgattcgagcaaatcaagatcttcaggtacagttggaccaggcactccagcaagccttggatcccaatagttaaggcaactctttgtttgcagaggtggaagatcgaagggcagcaatggaacgtcagcttatcagtatgaaagtcaagtatcagtcactaaagaagcaaaatgtatttaacagagaacanatgcagagaatgaagttacaaattgccacgttgctacagatgaaagggtctcaaactgaatttgagcagcaggaacggttgcttgccatgttggagcanaagaatggtgaaataaaacatctttnaagtgaaattngaaatctgganaaatttaagaatttatatgacagnatggaatctaagcctttagtcgactctggtactctggaanataacacctattatacagatttacttcatatgaagctggataactnaaaacaatagaaattgaangcactaaangtgaattgtcatacaagcgaaatgaaancnttatttganagccngcgggcttctaacatattgagcgataactttttgcaaatgaaagatgcccttcngctttntgaattgnaaaatattgaaacctganagntnancttagntgaattgaaacttaaatttgaaccctgnacnanaccggttaantgcctgttcctgataaaaanaagccntnangtgcttncctgntngatttancccccg

SEQ ID NO: 603 - DNA, 784 bp, Homo sapiens
  misc_feature (1)...(784): n = A,T,C or G
tgctttntaatagctgtttttaaatncntngctttgcgctcnntttgcaggcatcccatcgattcgaattcggcacgagggggacatcagtgatcgtaagtctcctgggnccgttattctcanattaggtgacggagctaagacttcgagaccatctcgtcctttntgtatcgcggaaacctgangaacgagccggcggcggtgacctgcacgagaagccaggctaactgggtgaagtaccatgcaagcatttcttaaaggtacatccatcagnactaaacccccgctgaccaaggatcgaggagtagctgccagtgcnggaagtagcggagagaacaagaaagccaaacccgttccctgggtggaaaaatatcgcccaaaatgtgtggatgaagttgctttccaggaanaagtggttgcantgcttgaaaaaatctttagaaggnngcanatcttcctaatctcttgtcttacggaccacctggaactggaaaaacntccactattttggcagcaaacttgagaactctttgggcctgaacttttccgattaagaattcttgagttaaatgcatctgatgaacctggaatacaanttagnttcganaagaaagtgaaaaatttttgctcaattaanctngtgtcaaggaaaatngnttcanatgggaaagccgttttccncctttttaagantgggaattcttngatgangncnaattcntnttgancttaactgnnttangcagcttttaaaaaantaccattggataaangagtccnaant

SEQ ID NO: 604 - DNA, 801 bp, Homo sapiens
  misc_feature (1)...(801): n = A,T,C or G
gttncnnctnaacccttttttgaaatcnntngcttctactctttggcatncatnccatcgatncggccccgtgtggggagacngacagcaccctttttntctggcatttgcccttgangctatagcgcctcccctctcccctcagagggcacagctgcaggcctgaccaaggccacgcccggctctcgtgctctaggacctgcacgggacttgtggatgggcctggactctccagaaactacttgggccagagcaaangaaaacctcttgttttaaaaaaattttnttcanagtgttttgnggaggagttttagggcttggggagagggaggacacatntggaggaaatggccttctttttaaaagcananaacacataaccttacaactgcctggcaagcccaatatcacttgtttgggccctancgggactccaangnagccacacgccccttctggaagggtgtgngcatgtnaantgtgtgccancgcgtgggctggcgtgtgaanatctatnaaataagtatanatgggngtntantatatgtgtntaaaataaangantggacatatttggncctctgngnananncttngaatctaagncaagagtnnntctngaaaaacnaaananagtnctntntananntttacgtaatnatcaatactntntccacntnaccctnctnntanntntnccnatatantcgantaattcntcactcntnnattcctngtnaacacnaatnaatnnaactatnaaatatntntnctnnntantngacatanncatncnnnccg

SEQ ID NO: 605 - DNA, 759 bp, Homo sapiens
  misc_feature (1)...(759): n = A,T,C or G
gnttctaatgtggttcnaanacttgctttngctcctttgcaggatcccatcgattcgaattcggcacgagagcctcgcctgggccggcctgtggctcccattttcctttcagcgggacaaaggggacttgttaccaggccattttctggatggcctgtgagatctctgcccctccaagaccctccaagtctgagcctgacccacagctgggacactgaattcagccctgggaaccatgggggcttctatctggcaccaggctgcagcctccccaatcccagcccactttgctgtgtctctggcgggctgtcctccttggtgggagctgtcctgcacactgtaggatgcttaaaggtatccctggccttcacccatncctagccagcagctcccagtcagacaacagccagaaatgtctccagactctgcccagcctcccaggtagccaccctcgagacatgacctcagagtctctgtgtctcctagaagcctgacagagacccccanggcagtgggtgggtggcgggctagagacccttgcctgtgtccgggaccctggcgccgntcttccctcctgtggatcccttcgcacttacaagtgttctnaantgggcagacgcctgggcaccccttgggccctgcccaancatggccatngngcangctttttnaacccgcatnggntttccangcctggtgaatcttgcttttccanggacnnnttggaacctttcctncggggcggggcccccnagcnct

SEQ ID NO: 606 - DNA, 809 bp, Homo sapiens
  misc_feature (1)...(809): n = A,T,C or G
tctncgtnaatcnnnnntttaaaagcctttgcttttgctcnctttgcttgatcccatcgattcgtgactttgtacctggtccaagctgatggggttttgctgctgttgacccaggcaggagtctgactagagaacaaactaaggttgctgcaacaaacaaggacctcttccaagaagggctcccaggcctggcgcagtgactcatgcctgtgatcccagcacttgggaggccnaggcgggtggatcatttgaggccaggagttcgagaccagcttggccaacatgatgagaccccgtctctattaaaaatacaaaaattanccaggcgtggtggcgcctgtagtcccaactactcaggaggttgaggcaggagaattgttgaacccgggaggcggangttgcaatgagccaanatagcaccactgcactgcatccttgggtgacagaagcgagactccatcttaaaagaagggctcctgtgtctacgtcatggtggggctanagagangtcccngcagctgggctgtgttgagtgannggctnntcttttnaannccaggcaatagtttgtcttgactctgtccttttctgngtccacatgacattttacatntttncnnagtttncttaatttaaagttgnctaattttaccattatacattttnaattggcatttcttttaccnatnctttttgtntgaaaatggtantntttgaaatcngnatcngttctaatgngntntattttnaccnaatgccaatnntacctnctttgnaanaatntattcgttttcnaagnttnaacctct

SEQ ID NO: 607 - DNA, 788 bp, Homo sapiens
  misc_feature (1)...(788): n = A,T,C or G
tntttctaatacnagtttncaagncttgctttnnnatccctttgcaggatcccatcgattcgcaaggcccgaggtgccatcccctctgggaagcagaagcctggtggcacccagagtgggtactgttcggtaaagagctcaccctctcacagcaccaccagcggcgagacagaccccaccaccatcttcccctgcaaggagtgtggcaaagtcttcttcaagatcaaaagccgaaatgcacacatgaaaactcacaggcagcaggaggaacaacagaggcaaaaggctcagaaggcggcttttgcagctgagatggcagccacgattgagaggactacggggcccgtgggggcgccggggctgctgcccctggaccagctgagtctgatcaaacccatcaaggatgtggacatcctcgacgacgacgtcgtccaacanttgggaggtgtcatggaagangctgaanttgtggacaccgatcttctcttggatgatcaagattcantcttgcttcatggtgacgcagaactataaagccctgtgtncacttatagacagtgaaaacccacgggtcttcatctttattaatcnngaaaccttggaatgcctgctttgttttgtaacccctttttaaaacctacctgtttttaaaaagtggtcatttttanttnacgntttanaaanaaaaantcctatttctttttccttttnattttaaaaaaaaattngntttttgttggggggntttggggggaattaaaataatttggcccccaactttaaaaaat

SEQ ID NO: 608 - DNA, 796 bp, Homo sapiens
  misc_feature (1)...(796): n = A,T,C or G
tcttttaatgctttttncaagccttgtttnaaatcctttgcaggatcccatcgattcgaattcggcacgagactaccccggctacggttcccccatgcctggcagcttggccatgggcccggtcacgaacaaaacgggcctggacgcctcgcccctggccgcagatacctcctactaccagggggtgtactcccggcccattatgaactcctcttaagaagacgacggcttcaggcccggctaactctggcaccccggatcgaggacaagtgagagagcaagtgggggtcgagactttggggagacggtgttgcaagagacgcaagggagaagaaatcataacacccccacccnaacaccnncaagacagcagtcttcttcacccgctgcagccgttncgttccaaacagagggccacacagaataccccacgtttttatataaggaggaaaaccggnaaaanaatttaaaagttaaaaaaatancctttcngttttacactactgntgtagactcctgntttcttcaancacctgnagattcttgatttttttgttgttgatgntctctccattgcttgtngtttgcntgggaanttttatttaaaaaaaaaaaaaattcttgtgagtngactttggnttttaaaccantgntagattttaacngnacccttaatgggttgtacntatatgntttnaaaacatgnnaanaaatatttaatgtaaaggnnctgttnntaaatntaaccacntanagaanttnnaaannnnttnanccctttagaacnattnntgng

SEQ ID NO: 609 - DNA, 790 bp, Homo sapiens
  misc_feature (1)...(790): n = A,T,C or G
gnnntttaaanacctntttcaatncttggtttnnaatcnttttgcaggatcccatcgattcgcatccagggagaacctcggggctgggacacctcctggccctcaccctgggtcatgtttacagtcctcagtgccccacaccggtggccccctgaggacacctccaccctgaccttgattttcccaaacgctgcctcttggtgacagactcagcccaaaaccccttccttctgtctctggagacccttgagcttggggaaatatggaggggtgtgtgtctgcaatcaaggcctctgcagctcacggctggcccggtgggctgggacttccgtctgaattttaaatacttagggntcattttttttctctggcaacaaagcttgatgttttcactgctttagtttcctgtttgctggtgggaggggatacggtctgtgactctggacttgctctgggggaacagttgtcactgcccccngggagaggggcagcttgggcttggaagaaagcacaccccngagaccagagccccttcnagagggatncttggctgcttcattgnctttcccccagcaagccctgctcttccacaagcnccttntggggtcttgggtatggtcccccgntcaccttctttccanantccctganntggtgtagggttgtgggttggcacanggaattttggggcattggggaaggggntttcaaaacttttnccaaanacccccgtgttcctnngnaaaattnaanttggtgggcttngggtgntnacccccaantcttngnc

SEQ ID NO: 610 - DNA, 786 bp, Homo sapiens
  misc_feature (1)...(786): n = A,T,C or G
gatgtttnnnannctggttctaatncttggaaanctncnnctttgttannngcnntttctgcaggatcccatcgattcgaattcggcacgagcccagctggacctggtggccctttcctagtgcctctgctgggggaggagaacctctgtccacgtggaggctaggaggtctcaggtgctgccctggcagcaccagagtgtgggccgggcccgagtgtctgcccctcggccctcagggtggggcacttagcacccagaagggaccaaaagcagggcatggcggtgcagaggagtttgggaggtgtaaacagccccatgcacgtggaggaggagctggctttcagccccagaccccacgctagcactttccacgctgcttgcccgctgttgatgtgcagttcccagtgcctgtgtgagccgacatctgctcagtcctatccctcgtcagcgtgtggagacccagctcctgcaagcccttctgcttccacgcccccagacagcttggtggagggtcctgcatctgggccaagctggggtgcacccagccaaagacaaagctgccttcacgtgcccaaaggattcaagatggtgcactggccccgggaggagtcttgaccaaaaatgggagcccgctcttgtggggaaanccccgacttcccccaccnanaaaccgntcccacggtgccggancttcccccttttcctttgtgggggcaacaanattggccttgggcnctttcaattnttncggaagctttcctgggtgtnggcttttgaccttaaaat

SEQ ID NO: 611 - DNA, 938 bp, Homo sapiens
  misc_feature (1)...(938): n = A,T,C or G
tgttttaaagccctntttngaatncntggcttncgnccccttggcaagatcnctctctgcaggatcccatcgattcgtttgtatttttagtagagacagggtttcttcatgttggtcaggctggtctnaaactcctaacctcgtgatccgcctgcctcgacctcccaaagtgctgggattacaggcatgagccaccatgcccagccaaagatcatttttttatatagacttcagncctttgtaaatattgtaactggggagtatagagtagaaaaaaagtatagntaaaacatttgttctacaaattaacctttaaaaatataattactgctaaaaatagagtgctgttacacttaaggaaaattagtgccattttggaaatgagatcttgtgccataaatncagctgaactgaatataaatgttcacaaattaatgctgtnaaaggaatgagttaagcagaaaaacttttaaccagcacttctcaaaaaanaaaannnannaattaaatnntataancnncatnnanatntatnntanntttncntctnnattncantaattttgtnttncaaatanttnnacctnnanctntgttntnnttnnnncnatnnantatcnntttatcnantatatnattanctnattntnnngnanngnatcntnctctatncnnnatnntncatatnncgtccnntnnnnnaantatgcctcatnatatntacnnnaaangtntangtatgnttantgcatnnncatnactnntgatgtcnnagtnnnanatattttgccnctcattattntgctnatntatntgtttgacacannatactnnnancnattcatcttctcgcaatnngngnacttttnanttacnnnnatgntannnntnatatatntatcattaganaccttttnaattntnnntncnnanacgcg

SEQ ID NO: 612 - DNA, 771 bp, Homo sapiens
  misc_feature (1)...(771): n = A,T,C or G
tgtttgnaannncggntnttgaaatncntggtacnnaaacnctttngnaaancncccctcnctgtntgatcccatcgattcgaattcggcacgagatagaaactaggcactgatttgtttatatttntcctgctcgagacacatgatgtttcatgtatctgtggctttttatagtttaaaataatttctggaaaagtcatagtcattatctctttaaccgctccctctcttccattctctttgttctctcttcctcgaactcctgttagtcatttgatcctccatatctctgaatatttttgtatttcttttattatttatttcttgtctctgctacattttacattgagtaaaagtgggatgtgacagtgggaaatcattagtgacttagaaattccagttggtcattgggccaattttgatgctaccttctctcttttatttctcacttcaaaataaaatttgcaaaaacaaaaaattaaatatagtatgagtccagttactggcctaaggagctaaaagcattctgggtttgtatgaagacagctgagttataacaaatgagagtactgttgtgtgactgcattaattattccctttttaaatgtacaagagcaangcattctacctgactgngttattgagctctgcancatacatggtgacanagctaaaacaanacaagccnaaccnanaaggaaaaccccagctttagggatactctgntcatngaatatagcctgaaaaatggntaatcaagaaagtnaacnt

SEQ ID NO: 613 - DNA, 774 bp, Homo sapiens
  misc_feature (1)...(774): n = A,T,C or G
tttgaatccttgctttcaaatncttggcactngccctctctgnaggaatcccatcgattcgaattcggcacgaggtaacgtgacacgtattttacttcttttantaggcggacacactttcttaaagtaataatacgtcatggccctgctataaggtagtagttctagaagactgtntatctaataattcagactaaagctatttatattgctgtgacaccacgtggaaaacttttataattccatcttatttctgatgtatatgttttattttctctgccttcataagaactaaaaaccaaagttatttacgtgaaaacaagatttttgtttgagttcatttacttgagatatgtttaaaaaatccaccttctgtcacactatagaagtatattttgaattatcaaaaggtagaattataactttcanaaaagaaaaaaatggtcaatttantttaactctatgtcaaaaatttatttatagtctcatatattcattccacaccccccgttcttctttccttctttctccctctgccttnttcttaatnatnatttttaaattctgaccaaaaataaagtngtggcaagtactttcttagcataacctggactggttgaagnagtaattctgntcctttaaaaaaantccccaactgggncccnggncaggnacaaaaanttntaangaacatntgggaattangcnaaatggatnttccttggaggtccaacccccaaaaatcattaggncnaccaaaattnaaaataatcg

SEQ ID NO: 614 - DNA, 754 bp, Homo sapiens
  misc_feature (1)...(754): n = A,T,C or G
ttggantcttctcngaaacncttngcnattgcnctntctgnaggatcccatcgattcgaattcggcacgaggttcttcaaagccaaccaagacaggcttntnagttttagagcttcagaacaaattgccaaaagccagagttgtttatgctagtgcaactggtgcttctgaaccacgcaacatggcctatatgaaccgtcttggcatatggggtgagggtactccatttagagaattcagtgattttattcaagcagtagaacggagaggagttggtgccatggaaatagttgctatggatatgaagcttagaggaatgtacattgctcgacaactgagctttactggagtgaccttcaaaattgaggaagttcttctttctcagagctacgttaaaatgtataacaaagctgtcaagctgtgggtcattgccagagagcggtttcagcaagctgcagatctgattgatgctgagcaacgaatgaagaagtccatgtggggtcagttctggtctgctnaccagaggttcttcaaatcttatgcatagcaatccaaagttaaaagggtttgtgccactagctcgagaggaaatcaangaatggaaaaatgtgttgtaattggtctgcantctacaaggagaagctangaacatttagaaagctttggaaagaaggccggngggagaaattgaatgatttttggtttcaactnccaaaaggtgtgttgcnctcccttctttgaaaaaacattttct

SEQ ID NO: 615 - DNA, 774 bp, Homo sapiens
  misc_feature (1)...(774): n = A,T,C or G
tgtttnaatgctgttttgaaatcttgtttcaaatcctttggctacttgctctntctgnangatcccatcgattcgaattcggcacgagggattctttcactgagcacaaagagttgttggggctttagcatctgactgattttgttacggggttgattctgaccataggaagtatgcaatgtgaatcactatttacagagaaacctacaacagatgcttgatgttgtagaaactgggacatatagataccaagcaaaattataagaaacctataaggtgttcaatacgcttgtgtttccaaaattcactgtncatgatcagtttggtgttcttgtaccacagtttttaactgaaggaaccagttgtaacagtctcaatttttaactaaaacttgaagaactaanacaacaatgcaaacctttcagcattgtttggccaaacttgttaaaactgtaatgcaagaaccaaatgcactgtgatgtggcaccaactaattagcaagcatgaatttttcacccaanagtgaaaaaaggaaaatctaccatggcttnaagtttaagagcagaacttcctgactnccattctatgactgatcaaaaanactaatagtttaaaacctnagcangccttgttcacgatatgcngaaaaaaaaagtgcttgcagtttannatccttatggaantttttcacantgtnacanggtnttgtaatacnttggangccctacattttcntangaatntattttncttggcctaanttggnntcaangc

SEQ ID NO: 616 - DNA, 769 bp, Homo sapiens
  misc_feature (1)...(769): n = A,T,C or G
atnncntttttgnaatcctctctgaaatcctttgctacttgctctttntgcaggatcccatcgattcggccagtcctcaccttccctagtcctcgtgtgtattttaggagatgcgtgggtgtggaacagcctcctgcctccggtccaggtgtactggggtctgtgtgttgtgtttctgcgtgttctcggcagaaagtggcatgctgtcccgcctgggtgatttgctcttttacactattgctgaaggacaggaacgaatccctatccacaagttcaccactgcactaaaggccactggactgcagacatcagatcctcggctccgagactgcatgagcgagatgcaccgcgtggtccaagagtccagtagtggtggcctcttggaccgagatctcttccgaaagtgtgtgagcagcaacattgtgctcctgacccaagcattccgaaagaagtttgtcattcctgattttgaggagttcacgggccatgtggatcgcatctttgaggatgtcaaanagcttactggaggcaaagtggcancctacatccccttnctggccaagtcaaacccagacctgtngggtgtctncctgtgcactggtggatngtcaanngcactcttgtgggccacacaanagattccctttttgcctgcaanaccntgtntgaaacccccttaacttatngccnatttncntnaagcaacccttaggcnanttgactnncnttcacaantttttggggcnaaaganncnaattggcctgccct

SEQ ID NO: 617 - DNA, 766 bp, Homo sapiens
  misc_feature (1)...(766): n = A,T,C or G
aganntcttcctttctaatnnctngctacnttctctntctgcaggnatcccatcgattcgcttcctcaaagcatggttgctgagnacccanagttgcgaggngtttttttactgatttagccaggtggcaatcatgagtgaatggatgaagaaaggccccttagaatggcaagattacatttacaaagaggtccgagtgacagccagtgagaagaatgagtataaaggatgggttttaactacagacccagtctctgccaatattgtccttgtgaacttccttgaagatggcagcatgtctgtgaccggaattatgggacatgctgtgcanactgttgaaactatgaatgaaggggaccatagagtgagggagaagctgatgcatttgttcacgtctggagactgcaaagcatacagcccagaggatctggaagagagaaagaacagcctaaagaaatggcttgagaagaaccacatccccatcactgaacagggagacgctccaaagactctctgtgtngctggggtnctgactatagacccaccatatgggtccacaanaantgcagcatctctaatgaganttattcttgcccttngttcaangatcttattgaaaggacatcttacagcttttcccaatgagaangcccangaagtgttaaacatactgnnttgaaaaaagcactntatnttntcccntnttaanatggtntctaaaatgtanaaanaaannaaaanaaaanctcgatccctctnnaacnct

SEQ ID NO: 618 - DNA, 762 bp, Homo sapiens
  misc_feature (1)...(762): n = A,T,C or G
tttnnagnntcttcctttctaatggcttggctactngttctttntgcaggatcccatcgattcgctcagtgcagcgatcatggctcagtgcagcctcaaactcttgggctcaagcagtgctccaacctcagcctcctgagtagctaggactataggcacacagcaccatgccccggctatttttttattttgtagagatggggtctcactatgttgcccaggctagtcttgaactcctggcctcaagcaatcctcccacctcggcctcccaaagtgctgggattaaaggcgtgagccaccgtacctggcccttggtggaatctttagggttttctattcatacatataaaatcatatcattggcaaacagagataattttacttcctcctttccaatttggatgccttagatttcttttccttgcctaactgctctgtctagaactcccagcactatgctgaatagagtggcaagagcaggcatttgccttgttcctaaccttagagaaaaatccttcagccttttaccattgaggatgatgtttgctgttagtttttcataaatgatctatatcaggcttgaataaatttctatttctaaaaanaaaaaatataacnnnntanttnatnaantnnttaanaaaanaaaaactggnacctntaaaacttatagtngagtcgtttnaccgtanatcccanantttgataangatacattggatnanttttggacaanccncaactaggaatngcnntgnaaat

SEQ ID NO: 619 - DNA, 754 bp, Homo sapiens
  misc_feature (1)...(754): n = A,T,C or G
tttggagntctttctttctaatncttggctactngntctttntgcaggatcccatcgattcgaattcggcacgagcggacccatcggagcgtaacctggatctccgcaggcctggcggaggccggccacctggaggggcattgcttggttcgcgtggtagcagaggagcttgagaatgttcgcatcttaccacatacagttctttacatggctgattcagaaactttcattagtctggaagagtgtcgtggccataagagagcaaggaaaagaactagtatggaaacagcacttgcccttgagaagctattccccaaacaatgccaagtccttgggattgtgaccccaggaattgtagtgactccaatgggatcaggtagcaatcgacctcatgaaatagaaattggagaatctggttttgctttattattccctcaaattgaaggaatnaaaatacaaccctttcattttattaaggatccaaagaatttaacattagaaagacatcaacttcactgaagtaggtcttttagataacccctgaacttcgtgtggtcccttgtctttggntataaatgctgtaaggtggnagccantaattntctgcaanaagtangncagcacttttcagtgatttgaatatcatcttggcttngangccangtggacaaccttgtcataactgacttctgaaaagaaccctntngatatttgatgcctcnggtgtnggtggaactgtcatttantngganna

SEQ ID NO: 620 - DNA, 767 bp, Homo sapiens
  misc_feature (1)...(767): n = A,T,C or G
gcgttctttgaaagccctnttttgaaaggcttgcttctaattacgggaaacctttgcaactgcagatcccatcgattcgaattcggcacgaggacccaggtagaccagctcaagagttcatgttctttgtnatcctcctgtgagctctctgtaagtcnntttcttgcccatcaccacatccctagtactgggtatcagtctggccacttggctttctggtttgccccaatgtggtctattcttgatgcagctaccaaagtaatgttttaaaaccattataccaagttactatccttgtcaaaacccccagtaactgccaatctcacttagaataaaatccggactcctgtgaagcacagcataaactggccactgcctatgcagcaacctcatctttaccgnttcctgccttgctcactcccttccagcgccgttattcttcctgatgcccctagtacacaacaactccttcctgctccaagagtaggaaaattactggtctctctgccagngagaancctcttctggnattacctttgcttcattgcngaatcttctncaatatcatcttctaaaaagagccttttaaaaatcacctttnctatnatgccctactcatttccagtccctgaaanggccattcccacttnantannacttattgctaacntgaaatacactaaatgnnanccttcatgaanggtanggcaanttaaatgcnttngcactggnnaggcnaagagaacaagcancntggnttcanaagn

SEQ ID NO: 621 - DNA, 828 bp, Homo sapiens
  misc_feature (1)...(828): n = A,T,C or G
tttctaatagcttgctttctaatnctnggnaacgctnggtctctgnaggatccctcgattcgaattcggcncgaggggtgacagagtgaaactcgtatctccaancaaacaaacaaaaagtncttaaacatatgtgaacaaaaatttngtgatggaaggattctagttaatgagtattgcatcaagatttacatctttcttactaaggaaaagagttaataaaaatngntctttattttacaggcagntactgaggctcttcccanntcncagtanacagccactcagccttgaaaatggagtgttgttgtttctaaacatatatttatgtcatttattnaggtacagttcacttaaataaccataagtngantctctcttgtnagtgatttgggtaggaagaggccatgtctanagttcnatttctctgttgggtccnantgaaattggaccttttnagttgttcanaaaaatnaanataaattnctcatattaaatcaagannctcntcaanttatagatgtggggtagggttccnngtaaaacccattatnaatctagaaaattatcnctatnganaangcntttaatatctnttaccntgaaattcattactttagtncaaggcctacctttaaangtttnnncnngaaccatttttannnnttcnncttttgnnccaananntcattttaanccaccaaaantcncaattnttnttncattnnaatannggatgnnaattatnnnatcnatgtgtcatatttnaccanganaatactgngctncntgnaataatnggtacactaaanncnnganntttnntcn

SEQ ID NO: 622 - DNA, 784 bp, Homo sapiens
  misc_feature (1)...(784): n = A,T,C or G
gtctttgaaacctttttctaatncttgctttctaatncttggcnactcnnctctcnctgcagnncccatcgattcgtttgctttcagtggttggctttcactgaaagaaagtgtaaanaaagtcagaatttatagctttcactatgtccaagactaggactgggttataaagattttcttttgtgaaggaaaataaaagaaaatttgccactactgcatttactttactattgtaaacttaagattcattccttagtctttggaattttgatgtctcaaaaccagatgagtggaagtgctgaatttgcaaaataaagctaagaatgcttaactctgcactttaagttctactctgaccaaattgaagatgagcagagcagccctgaacagcatttngtttatacagtcttgtttaagaatagaatttttttaactcttcatttnttgtctctgtggaagctgtgtaactctttttaaaatgcaatttaaaacattntggtattctaacaattctctcaanaaacagcatttccaatggnaatnggtattgntacgctgtaccttatgtattncctgtacctgaacacttgatgctgcctnacangaaaatagaactttatgttaaaaaataaaagtctggtncttctttgnaaaaacaacnncnctnctnctcnaaatccncnacannnctnnnaatntnctaanntnagtctnnnttnnngcanncttntnnncccnctnanctccctntntcntnttcatatctanantnacanccctccct

SEQ ID NO: 623 - DNA, 1164 bp, Homo sapiens
  misc_feature (1)...(1164): n = A,T,C or G
gggacttnttangccnttttcgaaatccnttncttccnaatcccttngcaactntcnnctntctgcangatcccatcgattcgaattcggcacgnagngagcnnattcncgttttnagngttctntttctntnatnnacangngaaanttccaggnnatcntgnnnccntatctgantnangctngnttnaacntngnnacaccnngnctnnnaancaaatttnanaaaagggnancncnnanancatnnnanntnnccaatctaccaaaatcanaacacncantgaacaacacanannatnnnatacnntctacnccaaancnncncatnncacgcacgataanacancnnnnaaaaanancnaancanatatcananncaaccntanacnannaatcanacnctnanctcccncacagcanngngacnaanaacnancantgataaancncacctnnntannacacacctnannanccnntntantcccgaataaccaatngccacnnctannccnataacanantcnctnanccctcntgcatcaaattantaaattcncnancataaagnanatcacagcctcnttcnaccnntgatcnaanctntanaccnangnnanncnntatnaaacnctatancantnnnactnnaacnttnnatcngcncntanaaattaaanatcnaanactcaatatnncggaatantnncntctctanataannntanaacggngnaaanacncctcanacataanngncntacnnatcgatctatcanntnancataaagtcacccgcatattnaccnacgnncaacataannnaaatnctactctcagaccatataaatntcgcntccntanatcagngcnanantacaaanacgtcgcnnnngtntggaccacacgncntagataaacacnnataaacantttttanatgtaacacatttcnnatctatnaaatancatcattnatgnanacgatnacaacaaannctacncnatgntactaaanacaantaaanntnanattaaaaaagttgcaannatncngngaaanntcccnanaaacantanatncntatttannnntnacnncggngtnnccntaaaaanaactctnnnntnnctggnttgtanatntannncnanctcgcg

SEQ ID NO: 624 - DNA, 798 bp, Homo sapiens
  misc_feature (1)...(798): n = A,T,C or G
ttgttaagcctnttttcnaantccttcctttnaaatcttttgnaaaccttggtanttgcaggnatcccatcgattcgagtaaagcatcctgcctcagaatgactttcctatcatgctttatgtgtcattccaaggtttcttcatgagtcattccaagttttctagtccataccacagtgccttgcaaaaaacaccacatgaataaagcaataaaatttgattgttaagatacagtagtggaccctacttattcagtcaattaagagtaagtttttttatgtggttattaaaacagtatgaacaattagtctaactctgcatagacagggtctagattttgttaacccaaatgtataactgcagttagcttaaattacaatttgaagtcttgtggnttntatatagctnggcactttattactcttttgaactgaaagcacactcccttataggttcatgtaactgtcctgtaataaggtgcttataaatgggaacaactacacagcctagttttgncacaacctttagcatctaaaaaagttttaaaagcttcttaaatgnctaatataaanggagatgctnatanccacaacatctattttaccaatattngtttccttacacttaccttgggantttgcattgagtgangttttngtaaaccccaaanatncccattaatanaaaaaanttggtacgttttnatgactttaatccannttncttgtnggnnttcncctaaaangcttnccnnnggnntggaantnnnantnatttntggggnaaggtttnngttnt

SEQ ID NO: 625 - DNA, 793 bp, Homo sapiens
  misc_feature (1)...(793): n = A,T,C or G
ttcttaagccncttttctaatgcttgctttnaaatcttttgnaancgctcggctntntgcaggatcccatccgattcgaattcggcacgaggaaatgcctctatgtangtgaagtgttctctctgcatgcaacagtaaaaattaatataatattttccccacaaaagaaacacttaacagaggcaagtgcaatttataaatttatatctaaaggggaatcatgattataagtccttcagcccttggactctaaattgaggggattaaaaagaatttaaaataattttgaacgaatttattttcccctcagtttttgagggcattaaaaaggcattaaatcaagacaaatcatgtgcttgagaaaaataaaattaatgaaaacacagcacttatgttggtttagctgcagcctccttggaggtagaatttatttatttaaaattactggttgcatcaagaaccccatagggtgtacaaaaggttctataaaatctgcattatagagacaaagangcaggcaaatncatgtcacaagggtnaagcttacagtttacaaactggggaacgcccagggtgtangatttnaaaaacgncactcttgagaaaacanatgtaatcanggntgctgaaaactttgcatggnggctttnaagacatttagnccttgttcaaaccaaaatttnttggnatttgccagattccttantnttgccatgggccatgacaccatttttggcctttatgncnctttaaaattttnaattaaaaataccntttccagtaannctaattn

SEQ ID NO: 626 - DNA, 825 bp, Homo sapiens
  misc_feature (1)...(825): n = A,T,C or G
ntttgaatncctttgnaaatccttntttctaatntntggatccttggcnactcgctntntctgnangatcccatcgattcgaaacggcnctaggaatcatcgaaggttgagaccgtgacnanttacatagtgatnaatacccatctatgtactgnngcctnctaaatgtntntctncnnnatggannttncctttaanctctagatccattgacancctgancatntctaaaaggcattangaaactgaacacatctgatacagaactctgcattnncttccnaantntgcccannccnagcctgntcctnnttcacgcttancacttatnatatgatcccactattcactnantctctgaagcttaaaacctangattcatgcttgactactgnataatnntacaatctactcctaatgcattagcaattcttgctagctctaccttcaaaatatattctgaatagactatntcttgccgnttcccttgcctncncatttcccatctgcaccccttctctnctncccaaaatcaatacactagntgtttctaaaaaaaatatngananntagnnnaaaancntaaataaatntaaaanaangnntancntnacanaanattnctaatataggnnanntnntgncaanaacnntaantnttnaatacgnnaaaactctctcnaanngannaanntatnnnagttaaaagnnaaatannnnaanantnccaaatntanaagataangncataannntatnagncnnaacgctaantgnngatganntntaatnngnatanannantngttannacaaaatntacnn

SEQ ID NO: 627 - DNA, 772 bp, Homo sapiens
  misc_feature (1)...(772): n = A,T,C or G
tttttaatgcttngtcgnacttctcccagnaatcgnttngaaactcngcnactcgttctctctgcangatcccatcgattcggaaatttgcactgatggctcanaaggcttacgttttggagagtatgacctacctcacagnagggatgctggaccaacctggctttcccgactgctccatcgaggcagccatggtgaaggtgttcanctccgaggccgnctgncagtgtgtgagtgaggcnctgcagatcctcgggggctngggctacacaagggactatccgtacgagcgcatactgcgtgacacccgcatcctactcatcttcnagggaaccaatgagattctccggatgtacatcgncctgacgggtctgcagcatgccggccgcatcctgactaccaggatccatgagcttaaacaggccaaagtgagcacagtcatggataccgttggccggaggcttcgggactncctgggccnaactgtggacctggggctgacaggcaaccatngagttgtgcaccccagtcttgcngacagtgccaacaaatttgaggagaacacctactgctttanctcngaccgtgagacacttgctgntnccntttggcaaagaccatcatggangancanntnggtnctnaancngnntggccaacatnctcatcaacctgtattggcatgnaccgcncttgctgnacnncngngccaaancnctcnantccgccattggggcttccggnaaccactnnacaccaaggttctnttggc

SEQ ID NO: 628 - DNA, 808 bp, Homo sapiens
  misc_feature (1)...(808): n = A,T,C or G
tcnctcgnaacntttnanncttggctactcgntctctctgcaggatcccatcgattcgaattcggcacgagatgacatcctcattatccacantgcaaagccaaccatccctatgatgggttcattgtggatcatgacttantgggtcaagagtttggaagtggctcagctgggcggncttctgctncatgtggctgccanatggtnccctgctggtnngcagnctngtctagagggtccatgatggctttactcacatgcctggcatcttgacagggacagctggnangcaaagnnnatctgggactgtncacagagctncttcntgtggcctttccagcatggtggtctaagggtagctggacttnctgcatnacagctcagggctcccagagctactgtcccaagagatnnaaagtggnaactgncaatcttttangctaangnccagaaaccattacccctgcaccncacagtctttttntanctgntgaaataaacattnnntttatcaattntaancattcgcaaattggaattaaataccttttactaattttgncgtgaccatctgcccctngttcaagatctaaaaaacttttatngntcatcntgnngatntaaaaaactnttgtgttngcatttanaacccntaagcannttnggcanttanannnaanannttnnnaaacccttntatanaaccttattaagttgangcatnngnantttcnccttnaaatccnaggtccttagggctangnnataccnttcntatngnaactttngggaacctaaancctctcct

SEQ ID NO: 629 - DNA, 827 bp, Homo sapiens
  misc_feature (1)...(827): n = A,T,C or G
ggccnnctttgaaccttnttcaaatcntttggcactcgccnctctctgntngntcccatcgattcgctgtgatccaaggcatgaaaagagtgcaaggtaancangnggcagcnttnatngaagcatnaaataangcnaaagcnnatgctnanctnanggagcangnngctaaagacaaccacannctanctgnntnctaatcatgctntgcttnctnangtgancttatagnaacgcantnagactncangcnttgcttggcncaacaaggnnacctanantcatnangaagcnnttgaactaangagtggctacnncctttnntnctcatgcntgacctgtaatnattcttctganttgaggcaanagcgggtnnaantnatngntnanntgnaaanactntnnnatccgnnnntnctgattannttncattnntntnaatgatanannctcatcnngctcgncctgnactttganangctnnnntcnnanntnnctgactttaggagnnnacctncagcganatgtnaagnanngaaattnanntncctnncgntccnccttgcngactnanngtcttgngnaacntnangtanntantctacngggngnnacnttggnnaattggggncttataaantnttcntnnaagaatgantgnaccaattntnnaanntctaagnttggggaaatctnngtttcctgnatnngnacaaaaantcgatttannngncnngnttnnttgggcntcatntgccattgatgcnattcnacttatgtcctcntggngcntnttnnaannnggnngnnaacattttttgtgtgcc

SEQ ID NO: 630 - DNA, 793 bp, Homo sapiens
  misc_feature (1)...(793): n = A,T,C or G
ttcnaatgcttggncnngagtccncctttgaacnttttcaaatnncttggcaactcgcnctctctgcatgatcccatcgattcgaattcggcacgaggcgngttgttctacactgcnntcngaagntttnntaanaagccaccacttagcngaggcnnctacangtcttggggncttagcgaagagaaatcncgctggcacttgncccgttcacntaagnactnntgnctgantccnagggtannngtncaccttgngnnccancagacanacccaanntgncntaaaangggcaggtctaagcttacnctngactncacnggcaagctgnangcctgtnctgccttccnctgcnntnacaaatngacagtnngaccaagagtcanagnaaaaactncaaggatacatntatcccantctnttctacacctntanattccntganctattgctcanaccnatcgtgcgggcaaaggcaagacttgggcaacattnttnaatacaatgatgctgacaantaatttccngctngttgccaggnatntttacncgagctnttgtgattccaaactaaagaatggngccnnnangcccntcnttantnctggncccccanaangancctaactngcgaaaggnnagnatggcattnacccaaaccaacttntnggattacnncaactccanaanatccgacggcatnnaanangcaaaacaacaacttcncnannatnnaannaatngnnccnnaaananaacccgngcntctnaaacnattgtggacccatncccc

SEQ ID NO: 631 - DNA, 752 bp, Homo sapiens
  misc_feature (1)...(752): n = A,T,C or G
gnagtnnccttngancctctntnaaatcgctttngcnantcgcctctttctgntngatcccatcgattcgaattcggcacgagatgttacagacatgaaatatgaacagaatnctaaaagaacataaaagaataagagctccttaaagattataaataaatggtgatgttaaagtaatagcaccattggacgaagctagggaatcaacacttgacagaaagatacatattttttttatacaaactacatatatttgagcaatcaagtagtagacatagagaattttctttttatggaagtactctaataagtaaagggctgatagaattatatcagcattttctagctcctggtgaattatgcattgggcatccatggctgccttagatcacaaaaataccaccagatatatgcctgtggatgaaagatcacaccaccacctgtgaaatagtcttccccacaaaaaatccaacccaaatcctatccagcctgtagatggtactcgagatcttctataagaaataaagagagcangctggtcacggtggattgtgcctgtaatcccagcactntgggaggccaangcaggtggatcgcctgangtaaagaagttcnagaccagcctgccaacatggtgaaacccccctctntacttaaaagtaccnaggatgagcccggccgttgtggcaagcacctgtggtccccagctacttgggaagctgagcangaaaaatcgcttgaanctggggang

SEQ ID NO: 632 - DNA, 751 bp, Homo sapiens
  misc_feature (1)...(751): n = A,T,C or G
gnnnnnnttnnnnnnttctaatgcttggctactcgttctttntgcaggatcccatcgattcgcaactagagaagattggacagcaggtcgacagagaacctggagatgtagctactccaccacggaagagaaagaagatagtggttgaagccccagcaaaggaaatggagaaggtagaggagatgccacataaaccacagaaagatgaagatctgacacaggattatgaagaatggaaaagaaaaattttggaaaatgctgccagtgctcaaaaggctacagcagagtgatttcagcttccaaactggtatacattccaaactgatagtacattgccatctccaggaagacttgacggctttgggattttgtttaaacttttataataaggatcctaagactgttgcctttaaatagcaaagcagcctacctggaggctaagtctgggcagtgggctggcccctggtgtgagcattagaccagccacagtgcctgattggtatagccttatgtgctttcctacaaaatggaattggaggccgggcgcantggctcacgcctgtaatcccagcactttgggaggccaaggtgggtggatcacctgaggtcaaggagctcgagaccagcctggccaacatggtgaaaccccattcttttcttaaaaataccaaaaaatttagcccangtgttgaatggntgcatgcctgtaattcccagcttctnanntaggctnanacaaggagcttncntt

SEQ ID NO: 633 - DNA, 806 bp, Homo sapiens
  misc_feature (1)...(806): n = A,T,C or G
ttnnannncnttttnaaaaggcctnnnnttgannctttcnaatgcttggctactngntctttctgcangatcccatcgattcgaattcggctntagggaaggggagggttggtgagtcccagaccttaaaaatacaaggttaagagggaccccaaagcaaaaaattccaacccttttcctcccagtcattgaaacaccaaaactattataccggagggtgtaatagttttgctgcccagttgtggtaggccagtagtggcctcccaagatgcccatgtcctaatcccaggaacctgtcaaaattaccttgtatggccaaaggggctttgcagatgtaatgaagttaaggatctttcgccaggaagattatcccagcttgtcangagggcttgatgtcctcacccgggtctgtataacagaagagcaggtgacgggagaggaggttggaggtgtancgatggacangaaactggagttataggagggcagctnaagccacagaatccaggccancttangagcccaggaaaatgcatttctttccacaaaagcccttggaaggccccaanccctgcttcccacccttggactnggcttcaatgaggcttaatttttataaattcntggcttgattttagaactcntaaggggaaataaattttgtgttngntttaantcanaaaataaatnaattaaaaaaaacttgaancctttanaaactntantggaattcntattancttaaanccnaancttggattaaaggatncatttgtttnaanttttgggacnaacccccaanttnt

SEQ ID NO: 634 - DNA, 775 bp, Homo sapiens
  misc_feature (1)...(775): n = A,T,C or G
ngggacttcgcctnacgaaccgctnggaaatcccntntntgnaggatcccatcgattcgaattcggcacgagtataaactttattttattctcttctggttttgtgttacatgacaagaaattgaattaanncaatanaattttagttcgggttgcttaggtttttactgctcccattcttgcttttactaatttatccaagattagatgtgattactatttaataataatttagtcctcacacttacaaaccacttacaataccagcatgcttctatcactgtaattctattcaattctcaggcccatgaggcatgccagccagacgaccagacagcatttatagagtgggcactcaataccagccacaaaagatcctgtgtcagaaggggaaacaggcttggaggcttggagtatgtcgtgatagcctccctccagtccacacaactggtactgctggggctgaaactagaactcangcctatgcctctcaagctcaagggtcggatgtccatgtncttcgcctctagaactatannngagtcgnaattacgtagatccaagacatgggtaagatacatnggatgagttnggaccaacccaccaacctaagaatgcantggaaaaaaatgcttaatttggtgaaaaatttgtgatggctattnngcttaaatttngnnaaccatttnataaagnctngcnantaaaanaaaggtttaaccaacccaaccaattggcaattccatttcaanggtttcaagggtccaangggggg

SEQ ID NO: 635 - DNA, 784 bp, Homo sapiens
  misc_feature (1)...(784): n = A,T,C or G
ttgagngtcctnctttnaccctttcnaatngcttggcnactcgctctntntgnaggcatcccatcgattcgaattcggcacgagatatagctctggaggtcaggacataggagatattgattcaggacttgccagagtatggtcttggggtgtgccctgatattacaaacagggatcttagtggctaggtgatgaggccatggcaaatgtagatggaccaagatcaatttgcctttctagatgaggttttctaggtgaaatgtttttgaaactattttgtagcctagtataatttataaaagtagagagaaactataaatataaatttggaangggttagctaaaaggagaaaacagcanaatcttcatatatatanaaatggatattaatttgctagaattaanagactgcaggtaaagatagntttttttaatacctctttttgctgtanaaaggacaggattaaatgatnaagggatgctggaatgaggaatggtaactttaggcaagatagtcttctgngacggctgatatgaacaatngagagtaanacatttnnaatacaanaaattgtcctgctgctcacccatcaagccttttcangtttcttcccttgccaaaantngtaanaacttntggtacttttnnancttgtatnnttccngttnattggttanaaccccttcgatnaanaannccatantttnaatttgggnttgacccccnaggttaaaanttnccntttnctcaatttccccttttcaaagntttaacntaattaan

SEQ ID NO: 636 - DNA, 765 bp, Homo sapiens
  misc_feature (1)...(765): n = A,T,C or G
ttnnannctttcnaatncttggcnactcgttctttctgcaggatcccatcgattcgtcctgcgcaggagccgcagggccgtaggcagccatggcgcccagccggaatggcatggtcttgaagccccacttccacaaggactggcagcggcgcgtggccacgtggttcaaccagccggcccggaagatccgcagacgtaaggcccggcaagccaaggcgcgccgcatcgctccgcgccccgcgtcgggtcccatccggcccatcgtgcgctgccccacggttcggtaccacacgaaggtgcgcgccggccgcggcttcagcctggaggagctcagggtggccggcattcacaagaaggtggcccggaccatcggcatttctgtggatccgaggaggcnggaacaagtccacggagtccctgcaggccaacgtgcagnggcttgaaggagtaccgctccaaactcatcctcttcccaggaagccctcngcccccaagaagggaagacaagttcttgctgaangaacttgaaacttggcccacccaactgaaccgggacccggtcatgcccgttccnggaaangtctattataaaggagaaagcttcgagtcatcanttganggaanaagaagaatttcaaaagccttcgcttatnttcngtattngcccgtgccaaacnccccngctttttnggcttaccggccaaaaagaagccaanggangcccnnanaacagggatnttgaaaaagaaanaatnaaaccctcnn

SEQ ID NO: 637 - DNA, 853 bp, Homo sapiens
  misc_feature (1)...(853): n = A,T,C or G
ttttgganccnttctttgannctttctaatgctgggntactcgntctctctgcaggntcccatcgattcgaattcggcncgaggatcagcccacctcggcctcncaaagtgctgggattacaggcgtgagccaccttgcccagcccacatcatacagtttgaaatgaaactttgccacaaccagcctttgctgtagcacacacatatatcactgaacctgtttgaaataaagttttttttctttntcctctggtattctgggttctgaagtctggtattctggtattctgggttcaaaagtatgacttgagagtgttgctctggtattctgagagttgctctgtattctgggttctgaagattatttgaaaaataactcctactacattgaaatgcagacttaaaaatttaaacattggattangcagtcaaaaaaaccaagcaagcataaaaggtcaataagttgtaatcttgatagtaaaggtggaaaacttattataaatggnaangaaagttttatttccttttttgtttgaatgggcaagtatgccatattatacccaaaagttcttttaaaaaaatatttcccattcaacccatttttaattnaaaattaaaaccattttgnaagggaaantttacccaanggcaanccttttttttcctccaaaaaggttnaccntgttnatccttctttttnggnaaatttanccaccaatttttttaaaggngggncaatggggnttaaaantanccctgnaagnnattttttnanccttccaggtttaaaantccccttggatngggtcttaacctgggngggtngnatanaaaaaaatanatcctntttanc

SEQ ID NO: 638 - DNA, 740 bp, Homo sapiens
  misc_feature (1)...(740): n = A,T,C or G
anttgntctttntgcaggatcccatcgattcgcagcaaagactttatttttgtacagaagatggtgaagtccaagacggtggctcagtgcgtggagtactactacacgtggaaaaagatcatgcggctggggcggaaacaccggacacgcctggcagaaatcatcgacgattgtgtgacaagtgaagaagaagaagagttagaggaggaggaggaggaggacccggaagaagataggaaatccacaaaagaagaagggagtgaggtgccgaagtccccggagccaccacccgtccccgtcctggctcccacggaggggccgcccctgcaggccctgggccagccctcaggctccttcatctgtgaaatgcccaactgtggggctgtgttcagctcccgacaggcactgaatggccatgcccgcatccacgggggcaccaaccaggtgaccaaggcccgaggtgccatcccctctgggaagcagaagcctggtggcacccagagtgggtactgttcggtaaagagctcaccctctcacagcaccaccagcggcgagacagaccccaccaccatcttccctgcaaggagtgtggcaaagtcttcttcaagatcaaaagccgaaatgcacacatgaaaacttacangcagcangaggaacaacagangcaaaaaggcttaaaaaggcggtttttcagctgaaatggcaccnncaattganaggactacngggccccgtggggg

SEQ ID NO: 639 - DNA, 774 bp, Homo sapiens
  misc_feature (1)...(774): n = A,T,C or G
ttttnnctnttaatcaatcctttgttgactccttggctacttgttctttttgcaggatcccatcgatncnaattcggcacgangtgatgncagattgnnantncactaaactgggcannncatcaggatcacctgtgggccttcannaatcananatncacccccaggccatgccctngacccagtgcaccaggacaagaaatccaccccaggcctctcccnagacccactgnaccagnacaagaaatccacccccangccangccccntacncactgccctangatntnnnggtgtnaaccnggtggtgctttgtaaagacgtgcangtggtaaccccacgccgncncnctcnnnacnttggacacatgatcatccacgtgtctgtgatttgnttcctcggnttnntttgtgaatngaaaataantgtnncgtttgactagggtttaagagcagcaggcagnccctcagctcagcaagcngccctctcagctcagcangcagcccaagtctcctgtangacttctatggaccatnctggcgggaatgaagaaactggtcaagctggattcgggactgaaagtgtaccntggtgacaccgtatgactnanctgactnanaaagatcactnatctttccacacttgnngggnaggagccnntannangttcaatatgcnntggtngantcccatngctacaatttcatggacacantttgattacttnngataannnaggcccttggaggccccttntccccttttaacnggaat

SEQ ID NO: 640 - DNA, 743 bp, Homo sapiens
  misc_feature (1)...(743): n = A,T,C or G
ctnnncctccttgatccnttcctnctttgaanncatnngctacttgttctttttgcaggatcccatcgattcgaattcggcacgaggctgacctacatcagaagctgctggatgcagnaaagtgaaaacagaccaaaacaacacngggcgaatcttnacaccattntgggtgccnnatntnnccnnngatatttgcttgctnagctctactcctccaaganannangnntcaaacnctncagcangntagagcanntnaagaccgcntntnctnacctnctnaagannctctgngaggancgcaatcctttngtggaanatagaatcaacagaccacactgcnctctggaccatgngctctcaaangngctagaaggtgctgaccttttnagactcttgcagaagaggcgangtggtgnganaccctnnaggaanactttcccgaactagaccncnncttncngaacnngntcaactgttggggnngaaancntgtganntgtngnccttcngagagacggcatattctatgatggcngacttnatncttctgcggaaccanactngacntactgaaagaaanctganaccaagcgtcttccttaaggacccttatatccagacnatcctttggataataccnctnggccaaaacctnntaactntgcatacaatcnggatggcaacatttgaactggnggccttnannaccnttaccggcttttcncattatgnaagagntn

SEQ ID NO: 641 - DNA, 740 bp, Homo sapiens
  misc_feature (1)...(740): n = A,T,C or G
ctttcctttgantcttcttctannaaacgttngaacgaantcngcacgagaccactaacagcatctacttgactactgatactttgatcatggagtttgggcatgccacttgatagaaatttgaagagcaattatatttttcaaaaagagttttgaataatgttaagatagattgcaacatgactatcaattcttcccttcccatcaaaggagagagtccgtttatccagcctttgaatcttgattattcaagtgacttgcttcacccaatgtaacattaataagcacaatacaagcagaggcttgccaagaacttggtttgtttctaatgcttagaagaagaatggtgtatgccatatttctgcatttagaactcacgtggagacatgtgtggcccaattgctcctctttcatctcaggcaataaccagacacgggactgaggccatccatgaccagccagccctagtcaacacacaacacacaagctgatcacagatgcatgagtaagcctaactgagaccagccaagaccagcctagaatagaactgctcagcagcaataaaaactaaataaattgttaccttaagctacttttagagctatttggaagtgtatttttgtgcagctaacatttactatcagataaaatggtgattgnttatctctgntttaatgatgntttaaggaaatggttctattaaaaggaaatatctggggctttgtcaccgttaaaaaaat

SEQ ID NO: 642 - DNA, 737 bp, Homo sapiens
  misc_feature (1)...(737): n = A,T,C or G
tancctttgannctttctcnncntgncntnnnngnaacgacctcggcacgaggacaccccagatgcagccaccaccagcagaagcgatcanctgaccccacaaggttttcgtggctgtggccgtgggctcaggtggcagctatggagccgaggatgaggtggaggaggagagtgacaaggccgcgctcctgcaggagcagcagcagcagcagcagccgggattctggaccttcagctactatcagagcttctttgacgtggacacctcacaggtcctggaccggatcaaaggctcactgctgccccggcctggccacaactttgtgcggcaccatctgcggaatcggccggatctgtatggccccttctggatctgtgccacgttggcctttgtcctggccgtcactggcaacctgacgctggtgctggcccagaggagggacccctccatccactacagcccccagttccacaaggtgaccgtggcaggcatcagcatctactgctatgcgtggctggtgcccctggccctgtggggcttctgcggtggcgcaagggtgttcaggagcgcatggggccctacaccttcctggagactgtgtgcatctacngntacttcctctttgcttcatccccatggtggtcctgtggctcatccctgtgccttggcttgaatggctttttggggcctggncctgggctgttaaaccgccgggctggnatttaacctntnggcn

SEQ ID NO: 643 - DNA, 748 bp, Homo sapiens
  misc_feature (1)...(748): n = A,T,C or G
cttttaaccntttganccntccctcnaaaccttngatncganttcggcacgaggaaggcagaagtgtaaatgaacatacantttaaggagaaagcctgctgtgtttnncttgttcagcagggtattatgaattagcacaagtattgcttgctatgcatgctaatgttgaagatcgagggaataaaggagacataactcccctgatggcagcttccagtggaggttacttagatattgtgaaattattacttcttcatgatgctgatgtcaactcccagtctgcaacaggaaacactgcgctaacttatgcatgtgctggaggatttgtatgacattgttaaagtgctccttaatgaaggtgcaaatatagaagatcataatgaaaatggacatactcccttaatggaagcagccagngcaggtcatgtggaagttgcaagagttcttttagatcatggngcaagcatcancactcattctaatgaattcaaagaaangtgctctaacactngcttgctacaaangccatttggatatggggcgctttctacntgaagctggtgcagatcaagagcncaaaacagatganatgcacactgccttaatggangcctgcatggatnggacatgtanaggtggcacgtttgctttttggatantnggtgctcangtgaacatgcctgcataatcatnttgaatctccattgacgctagctgcctgtgganggacatgttgaaattgcngcct

SEQ ID NO: 644 - DNA, 759 bp, Homo sapiens
  misc_feature (1)...(759): n = A,T,C or G
tcnnncncttttcgatcttttgagncttgcctttgaaccccttggntacganttcggcacgagggaaccatgananccnagagctagaattgctattggatnncgtctattctctntttgcttattgggncgngntncgtggttnctggcctcangggtnnncccgaanganggggtatctnngagcnanttntgcnntttacnggctagcttgntgggggcttaanntgccactnttanacatgctntactantcantgagannntncnntcgaccatntannacnatnctgtgnnntccngtacnctntggccgnatggagctattagcttcaanatgnntcgnantgttacatgcanncactganntnactatccannatntaagtnctcttngcttactgtgaacannngctactnncttggatattatagnaaggntcnttgatacncgatnatcntncntgtcagatcnataaatancanctataccnactgtnnaaatnccatctggnggncttncnatccanacataattgcattannncgtcnaattgngatanagtnttgaaagantctnggtttagacnttggatgttgcaatgnttgtgncttanaanttatgtgctggctactgantaanctgggggcatgacnttactggnttgacctaagnggngaantcnatggtccgattgctggnccctanccttaagntttgccatgaataggncttttgccctaaaataanaccccttt

SEQ ID NO: 645 - DNA, 766 bp, Homo sapiens
  misc_feature (1)...(766): n = A,T,C or G
tnnnnnnntttcaatntttnancgtcccttaggatccntcgattcgatccagatgggatacctctaaacacgaaaagaaagaagattccattantgaatttttaagtttggtttnatcaaaagccgagccacctangcaacagtccacccccttagtaaacaaagaggaanagcatgcaccagaatcatccgcaaatnagacagtcaacaaagatgtggacgcacaggctgaangagaaggganccgccatccatggacttattcatggccatctttgccagttcctcatatgaaaagtcctnatcctgcgangatgancacggtgacagtnaanatgatcaggcacgctctggngaggacaacttccaaagctggnaagacactgacttggnggaaacatcatctgtggctcacgctnttgtgccagngccctaggagccgtcaccttccttcccgatacaaangatgcagatagatnanaganaagagntcggccngnngctgcctcccgtcttatgtnccaatgctcgtcagacacttgaagttnctcanaaagagaaacattccaagaacaaagacnagcacaanggcaatanagaacacaggccngaaagaattganangaaattggaaacactngaagcacnaaacacctaangnaatccaaaanaattggcaaaccaggggaaaagtaggtncctncgngaagtttcgacagccngcggacaagccanaattgacnatgaaaccgcatacgtgtcttnc

SEQ ID NO: 646 - DNA, 752 bp, Homo sapiens
  misc_feature (1)...(752): n = A,T,C or G
ttnnnnnntttttatcctntnatncttnctctttggatccatcgattcgctccaaggaaaatccacctcgcagcttgtaaatctacagcctgattacatcaaccccagagccgtgcagctgggctcccttctcgtccgcggcctcaccactctggttttagtcaacagcgcatgtggcttcccctggaagacgagtgatttcatgccctggaatgtatttgacgggaagctttttcatcagaagtacttgcaatctgaaaagggttatgctgtggaggttcttttagaacaaaatagatctcggctcaccaaattccacaacctgaaggcagtcgtctgcaaggcctgcatgaaggagaacagacgcatcactggccgagcccactggggctcacaccacgcagggaggtggggaagacagggctccagctaccacaggacgggctctgggtatagccgttccagtcagggacagccgtggagagaccagggaccaggaagcagacagtatgagcatgaccagtggagaaggtactagtcaaccttcagaaagagtatggagagaaaaagaggcacacctggacgcagagccctgccagcgccctctctgctgttgcagctgcaaggagaccatgcctgtgggagccaggcctcgcttgcatgaanaaggaacgatgcctttttcaatggtgtcttccttccattgtgcanaanaaccttttggtggcttctcttccgacttgtgcctgatt

SEQ ID NO: 647 - DNA, 743 bp, Homo sapiens
  misc_feature (1)...(743): n = A,T,C or G
ttaatcctttcaattcgttcntctttggatccatcgattcgaattcggcacgagccctccccggcttcccccggagtgggtcaccacactgttttttatcatcatgggaatcatttcattgactgtcacatgtggtttgctggtggcttcccactggcgaagagaagctacaaaatatgctcgatggatagcattcactggaaccactatgagaagattataggaaaaacaccaagactagaggactctgggttccttttatgcaaagtcaactcttctgggtcacagttacccagcaacaaaaataaagagaggaccaggacgatgccagcaccccgtttatcctgagtgaactctccggaggcctcttcaagcttgtgggttctctgctgtcttgaagccatccatccatttgataggttttgcaaagacttggtcctgccaagatggttttaatcatttctgctaaaaggaatggactcgaggatttgatctcattttagatgcagttgtcctcacttggccattttacagcactttagtaaatatggccagtgtatttggtcactattaaatcaatccccattcattatctgtcanggcaactcagtgaactaaatactatgttctgacctctggcactctttctcatgttggttaaatatttaatattgnctaaggcaattcaagtatttttcttaaataaaaaatatgaaaactcaaaaaaaaaaaaaaaaaanana

SEQ ID NO: 648 - DNA, 759 bp, Homo sapiens
  misc_feature (1)...(759): n = A,T,C or G
ttttaatccctttcatttcnttccttngtaggatcccatcgattcgttttttttttttttggtgattggattaacaattttattctgnntccactacaaangggctggtgttttgttccaaatgtttagctgggagggctgtagggacccctgttacccccattaaacacagtaaagcatggatccagtcagccccctgctggcaggtgtgggcctggcaactacacagatccaaccccaccctcctgggtgcggccagaggccaaggcagtcgcccgagctcctgaatcccaagaatggttctggcaagtactgctgtttgtttgtaggggcaaagagttaaaataaaacgaggttctgccatggctaagccttgtggaaaccagaccccaaagcccctgccatgccangggtctcaacnccagacgcttgttatggaggcaccancnggtantggcccctgtaagcanggccagagtcgggacaaagagcaagantgaaacanccaagagacanaggaccatgctggaccattgggcacncangaacctgcctgggaaaaaccggggggcaangctggcatgggaatgaacacctgcttgntgacacctatntgagcttcanttnccttaacttgaaaaattgaacangcccggtncggtggctcataccctgtaatcccancacttttgggangctttangccgnttggatcattgangttaggaagattaaagaaccancctgggccnacattgg

SEQ ID NO: 649 - DNA, 746 bp, Homo sapiens
  misc_feature (1)...(746): n = A,T,C or G
tnancctttgaatccttgaangnngatccctcgattcgccggaacctcatccagtgccacccatcttgacaccttctccctcttcagcttttccaacagtcactactgtgtggcaggacaatgatagataccatccaaagccagtgttgcatatggtttcatcagaacaacattcagcagacctcaacagaaactatagtaaatcaacagaacttccagggaaaaatgaatcaacaattgaacagatagataaaaaattggaacgaaatttaagttttgagattaagaaggtccctctccaagagggaccaaaaagttttgatgggaacacacttttgaataggggacatgcaattaaaattaaatctgcttcaccttgtatagctgataaaatctctaagccacaggaattaagttcagatctaaatgtcggtgatacttcccagaattcttgtgtggactgcagtgtaacacaatcaaacaaagtttcagttactccaccagaagaatcccagaattcagacacaccttcaaggccagaccgcttgcctcttgatgagaaaggacatgtaacgtggcatttcatggacctgaaaatccatacccatacctgatttatctgaangcaattcctcagatttcaactatcaaaactagggaaaactgngagtttaacaccaagtnctacaacacaaggttggaaacacctgaacttggnggatcatgataccacttnaccactccnt

SEQ ID NO: 650 - DNA, 789 bp, Homo sapiens
  misc_feature (1)...(789): n = A,T,C or G
tgacccttttgaaantccttgcatntttcanaccntttggtacnnncantttnngntggatccctcgttcgctgnacaaaagatgtttttcaattaaaagacttggagaannttgctcccaaagagaaangcattactgntgtgtcagtnaaaggaanccttcaaagctttattngatgatgggtttggttggactgtgagaggatcggaacttctaattattattgggcttttccaagtnaagctcttcatgcaagggaaacataagttggaggttctggaatctcagttgtctgaagggaagtcaaaagcatgcaagcctacagaaaagcattgagaaagctaaaattggcccgatgtgaaacggaagagcgaaccaggctagcaaaagagctttcttcacttcgagaccaaagggaacagctaaaggcagaaagtaganaaatacaaagactgtgatccgcaagttgtggaagaaatccccaagcaaattaagtagccaaaagaagctgctaacaggatggactgattaccatattcgcaataaaatcttgggccaaaagaaaatttgggttttgaaagaaaataaaaattgatnggaactttttggaattccagaagactttgactacatagacttaaaatattccatggttggtgaaaggatgtaccaagctttgtgaaatattgtaaatttttaaacctattatctactaaagtngtactggaattgtccntttgcctgttnacttgnggtntantcatttntatttaatgntnaaattaang

SEQ ID NO: 651 - DNA, 757 bp, Homo sapiens
  misc_feature (1)...(757): n = A,T,C or G
tnnnnnctaancctttgaaatcgtccntgcatgatccctcgattcgaattcggcacgagcagatatttactgaaggaatctaggttgttttttcagtggacaatgggaataanncatttctaaagcaccgactggagaggaaggcaacagagacaaggagagaagccgagagacatgtctgcgtgctgccacgcatctgagcgattgctctgtgaagagttgtacactgaacattttcaggggaggctgtttacccaggcaatgtcctcaaacaagcctgtgccggggtgtcctggaatctgtgccaggactgtgtttttagcccttcacctctcagctttagcaggacatgaaccagttataacaagatggccctgcagctggttacaggaatgtgacatggcaggatctatggaaccaaatggaaggttttnaggtgatgtaggtctttcacagttagctttggggaatacagaatactcaaataaagtgctttgttattatttcagagggaatggcgattgaaatgttacaacagagatttcttggtggtagctatttgggtaaangtatatggatatttntctgtacatgtgaaattatntaaaataaaagttatataaattacattgacaaaaaaaanangtanaaaaaaaactcgaacctttaaaaactatngtggagtccgtattacgttagatccagaccttgataaganaccattgatgaattttggacaaaccccactngaatgcnn

SEQ ID NO: 652 - DNA, 759 bp, Homo sapiens
  misc_feature (1)...(759): n = A,T,C or G
tcnnncctttaatgctttgaactcgttgcactgcangatccatcgattcgaattcggcacgaggctgnccaggcagttnnatggcctnctggttgtgtgccttcacacccgcctacagccccacctcaccatcaagcgctgagccaatgcggntgtggctggccctgagttcctgagtcagctccttgccagggccagagctggtnacagcggggcancanggtgggtagcctctaccagncagggcagtccctgaggggccagcangggggctgactgcctagtggctnaacctactgaacccacccactcccagcgatgctacccagaaccccaacggcntgaatcctgcacantgccgggcantgccagactcnaaagggctcgctgtggggacagccccgtcatggccacanactctgtcctcacctttgattgtcaggatgacagnccccaccaccatgatgagcgtctgcagggcgtccgtgtagattacagcagccaggccccctgccaatggaagcaaggttgctggaaggggccctggtccagggaggaaggacaccgggaggaacttctgggcttctgctggggccacttcctgggctgntnctcnggnctgtatggggaagtggccttntgacccctttacacgttccctgggtggaccttccctgnttgcangcacccataccttgcgatggtgtncanggctnttgatgcccnaaactttaggattgttggatangtnnaatctnc

SEQ ID NO: 653 - DNA, 820 bp, Homo sapiens
  misc_feature (1)...(820): n = A,T,C or G
tgcaatcccncngnnaatcgctttgaaancnccntcnctgtatgatcccatcgattcgcaacagtccaggctctgcagacagcatcccacctgtcccagntngctgacctgaggagcatcgtggnggagattgaggaccttgtngctcgcctggatgaactcgngggcntgtatctccagncanaanaangacngcatacaacagaccattangangntgtcatctacantntnanngatcatntgngnacngacccatccattaatgaggatcanggcntccanctgatgaacgctgatcttctgcaanaagaacgttctagntctancnnanngccntcancctncgnctcttgagctcagtgngtcangctcntaanatcttnncacntgccaanctgtgnggnctgccttnagncttccggataggcactntnatnngacntgccctatanttgccngcngnnantnaaccaantgnaccatngtcactctgttgacatcanggcnatntgnntaaactaatnncttngcngcactctagtnngcgttgncactgcccncgtnnnctancntaccanttcncattncccntttaatgggnaaaganatnatccctacnatcatattncccntnnaatggattcgagncgnaantcttnnntantnatctnaancctaaatgntcacatnnaaactttanangncatcnnnnatgnaaccnancnatggctaaanggcctcattaangccngntttttcaaacttgaaaantgcatnccnccattganaaaggantacacgggcccccntgngnggg

SEQ ID NO: 654 - DNA, 768 bp, Homo sapiens
  misc_feature (1)...(768): n = A,T,C or G
tttnnccccnttttgtncctnttgattcncttgctacntnttcaaatcngtnggatcccatcgattcgccacatttaagtgagatatgggaaggaggagcagattgtttttgaagggaggaagagcagttacttagggtcaaattaagttgtaaaatcccccccgggattttgtatgtaagtcaaagtgaattgtatttggaagaagaactggggagcccacctctggtattttttttatgtccctcatatggacaaataaacctctggtattaaatgaattttcttttgggggattctatatattcgggatttcaaccaccaacctatctggtttttcccgctgaaatgttgggtgatggaatcaggagagcagatttggagactctttatattttataattgagagagacaaagagaaaaccgtttgatttgaaaaagttttctaggttccctcaggtagatggaaattttcatcaaaaacagtttattcaaggtacatagcctactagtttcccatttgagagtaccgcagaatgatacgacgtgtactgcttctctacgcagaatgaagtataaaattagcaccnaatagtactttaatttgcaggtgctaaactttttacatgcttnatctcatttaattcttagaagaaactaattttaccaagtaaantgtctggaccaaccatntgcaggtccaaaannctggaaaaaccgtnaggtttggactcctacatagcctnttttntaagtnncntnntaaatn

SEQ ID NO: 655 - DNA, 752 bp, Homo sapiens
  misc_feature (1)...(752): n = A,T,C or G
tntncctnttgatccttgcactannaaatccgtggatccctcgattcgaattcggcacgagggtaaacctatttatataatagaaggatgattataaacatttaataaattatatcaaatagatattatatattaaatgggcagataatagaaatctgtccaagcaaaactctggataatttttatgttgccttattttttgttttctgtgaactccaagaaaaatgagataccagtttggaacagatgtaatattgctgatttaacagtttagggatactccccaagttcaataattttgccaagatacaaatttaaatggaaccttttatgaagcttcatagtgtgtgaagaacttaccttgtttatatgtttgaagacatacatatttcacatttcagaagagtctatacatagctcaccaaatatcaaaaccaccttgttagaaaacattaaggtctgtcttatttatttgttcatttgnttatgagacacantctcactctgtaatctcactctgttgtagaggttgagtgcagtggcacgatcacggctcactgcaacctncatctccctgactcaaggaatccttccacctcagccttccaagtagcanggaccaccaggtgcaccccactatgcccagcttaattttttgnattttattggacagattggggttttgcccatgttattcaggctggatccttnnggcctcaaactcctggggcttcaagccaatctggcctgcc

SEQ ID NO: 656 - DNA, 754 bp, Homo sapiens
  misc_feature (1)...(754): n = A,T,C or G
ttttccttttnatcttgctcnanaanccntggatccctcgattcgcagaggctggttcagaaaaggaggaagaggcccggctggcagccctggaagagcagangatggaggggaagaagcccagggtgatggcaggcaccttgaagctggaggataagcagcggctggcccangaggaggagagtgaggccaagcgcctggccattatgatgatgaagaagcgggagaagtacctgtaccagaagatcatgtttggcaanaggcgaaaaatccgagaggccaacaagctggcngagaagcggaaagcccacgatgaggcggtgaggtctgagaagaaggccaagaaggcaaggccggagtgagtgcctgcggcccctcacagggctgangccagcccctatcagctggatgtggcagaggcatgccanaggacctaagtgtgatggaccagantcacttctnctcctcctttctncaccagccctgacccctcatgctctctggctgggccantgggcaaccctcgcttccttggatggactgcctgctggtgcctggtcagagaanagcctnttttcccagnctgattctntgctcccaggaaccaattgaccatnaaggtgcaaangccnanccaatccccttacntactggcccccattnattcctggctttttcanaagcccccntgccaaacannttgggaccccctgattnnttaagggtgccttttnatnggggttaaaggttaant

SEQ ID NO: 657 - DNA, 734 bp, Homo sapiens
  misc_feature (1)...(734): n = A,T,C or G
tntgttccncnatgaacgntngaancnnnatnccnttggatcccatcgattcgctgcggccgcaggagctgtggcggttttcctaatcctgcgnttatgggtagtgcttcnttccatggacgttacgccccgggagtctctcagtatcttggtagtggctgggtccggtgggcataccactgagatcctgaggctgcttgggagcttgtccaatgcctactcacctagacattatgtcattgctgacactgatgaaatgantgccantnaaatnaantcntnngaactanancgagctgattganaccctagtaacatgtataccaaatactacattcaccgaattccaagaagccgggaggttcagcagtcctggncctncaccgntttcaccaccttgcactccatgtggctctcctttnccctaattcacagggngaagccngatttggtgatgngttacngaccacgaacatgtgttcctatctgngtatctgnccttatccantgggatactaggaataaagaaagtgatcattgntactttcaaagcatctgccgggttgaaacgatntncatgtcccnaaagatttgttgatntgcagctnctcantgctanngtcggttttgaanaaagtttnccaaatnnntgtaccttgggccaatttntngacaantngaactgacttgtnagaatcttgcagntaacngtcttgtntcntccaattngggng

SEQ ID NO: 658 - DNA, 783 bp, Homo sapiens
  misc_feature (1)...(783): n = A,T,C or G
ttctcctgaaacgcttngcacttccctcnctgcaggatcccatcgattcgaattcggcacgagacactgtcccactccatcacccaggctggagtccagtggtgtgatcatagctcgctgcatcctccagttcctgggttcaagccatccctcctgcctcagcctccccagtagctggaactacaggtgtgtgccatcacacctggctttacatttttctgtggggtcttactatgttgcccaggccggtctcaaactcctgagctcaagtgatcctctgnctcagcctccagagtatctgggattacatatgtcggctaccgtgtctggccgttcacatctttggccactattngcttgtgaaaaggtatnatgaggtggtacttatcatngttactgtgtctcatgttnngtatatttttgcttcatcaactaagatgcactgtaacatctgtgaaatctggatatattatcaaanggtttatcatagttttgttaacaatacactgtcgttttactnggtgcctaanataatggtatagttgngaggtgatcttagatttgatgaagcacagtatgcaangtaggcctaatggngggaaagaatgggnaattttcanangcnnggaagtatttgntnttttgtaaatggacttgaaaagcttgttctgnnggattggacccaacccctttccctttnaaaccccgaattctnatngactnttccaacttngaaaactttgctcnaacttaaatacctttnaaaaattaaccntgaccccg

SEQ ID NO: 659 - DNA, 741 bp, Homo sapiens
  misc_feature (1)...(741): n = A,T,C or G
tcttcctttgtatacctgctnttgctctttntgcaggatccctcgattcgctttgagctaggataaaaattgggtaaaggacatttgcttacctgcaaatgaatcactgtggaaatgtgatcttcccatatcatcaagaaacttgttttctggatgaatactgggagaataaaatgagaactctggagtgagctaaattgatcccaattaagtttttctgcttagcagacagaaggtataattttttgacaccctttcccacctggtgcctatgctaggcttgtcctgagaacatccctcagtaacttgatattcacatgacctacaggatgtcccatctgcagggctgagtcagttggggaacaccagaggctacacagtagctcttcctgctactcggttaatgagcttggcaggttctttgtctcactgaattcttatcatggaaacagcagcagcagccgctaggaaatcttcaagtgtagtgtctgtgctaacccagtggtaaatcccttagatcccctgctggtctctggcagtctccttgattttgggtaccatgtatattttccgctttgactttaacgctttctaggatagggtaagcacccttaattcangcactgtccattagcttcctttgcaaaagctacttatggncggtcacaatncaacactnanacagagccaaggcaatatcctcttgcccatggctatgatgtcagacagtggatggctcnt

SEQ ID NO: 660 - DNA, 734 bp, Homo sapiens
  misc_feature (1)...(734): n = A,T,C or G
tctgnnctntgtntccttgctcgtgttcttttgcaggatccctcgattcgaattcggcacgaggactggagaagtcagaagtagaaaagcagattgctaggagagacaggatgacagattttggtcagaaaatgggatattggagtttaaagtatcaaatacagaatagttccagatgttcagagatccagcatgggattaggtactgaaatggattagaactaaaagtcactagaatttagaaattgagaaccatgagagtggatgcaatgacttgttgcttgattgaaaaataaattaataataataaaggaccatgagactagcctgttataggggttatctccatgaacattgaattttcccaggatcatagcaggaattgggtagagaaaaagattatgagaaggtgccagagtcttcagtgaatgtcaggaaattaccaggaagtcagcatatgacagagaaaaggacagtatgttatctgcatcaaaggaaaatgtgcttttgttgaaaagtacagaaaaagccaatactacaatactgtgctaagcccctacctgtactcctctcccacagctgcattccagccctgtggtataaaaggtgtgagaatgagcttttccaccagaatcagcaggtttagttaaagcatgagcagaacaagcatnctatgaagagactgaggatgtaggtgagtggtctaaatctcatnnaaggacattgcagtngat

SEQ ID NO: 661 - DNA, 762 bp, Homo sapiens
  misc_feature (1)...(762): n = A,T,C or G
ttnnnnnnctccnaatcctccngatnanatcnctttgnanctncctgcaggatcccatcgattcgaattcggcacgaggtccatacatggagctccctggagcccgtgtgntntcgtgtgactgaacgttttgtgatgaaaggaggagaggctgtctgcctttatgaggagccagtgtctgaattgctgaggagatgtgggaattgcacacgggaaagctgtgtggtttccttttacctttcagctgaccatgaactcctgagcccgaccaactaccacttcctgtcctcaccgaaggangccntngggctctgcaaggcgcanatcactgccatcatctntcagcaaggngacntatatgtnnntgacctgnagacctcagctgacnctnccttngtanggttngatntnggaagcatcccaaggngatttagngacnntggantcctnatnactgataanacncnaactatantnttttacccttggnagcccaccagcaagaatgagttggagcaatcttttcatgtgacctncttaacanatatactctgaatgaatctacgttgtatttatcaggnggacaatgggaataaagcntttntaaagcaccnantggacatgaaagcaacagacacnaggagnnaagccttgagacatgtctgnnntctgaccgcatnttgatccantgntctgtganganttnttcactgaacattttcaagaggagggtgnatacccctggcaatngcccnaanaaag

SEQ ID NO: 662 - DNA, 745 bp, Homo sapiens
  misc_feature (1)...(745): n = A,T,C or G
nanatccnncnantncttnttgttcntgtccgnangatcccatcgattcgaattcggcacgaggtttcatttaagaagaatganctagatanatgtgctcttctggttaccccaccctgacagagtgcatttttacacggctagcaggggttgagactgcagcctggcctgccagccattggaggtgtttaaggaagggcagataatgtgactctttgcggggtgccatctgcttacccattagcgagcanagggggtttctgcgggtgacccccagcatatttctaggttacttatgggcagatttgtaagtgacaaaactccagctgatgctgggaatggggagagggcccttgagggactttgtggttttgtgcttctggtttcctggccaaccccagggtcacttgtctggaggcccagctgggcactaatgtctgccaccgactatgttaaagtgtataaatgattcctctatttgggagagatcttccaatccagaggagcccntcttggactgcctgggttaaatctgcatancagangtggttgatgaagttcatctgaagaaattcagccccacctncccaccctgccnttcctgctcccttttgatagtggcttctgggtactcgggcnngtncttgggacaccanccttntctgggggtctnaagccatcccgttggggctgtcggccaagcctaagttaatcgtgtgcctntattgggaggatngctnntcct

SEQ ID NO: 663 - DNA, 748 bp, Homo sapiens
  misc_feature (1)...(748): n = A,T,C or G
taatcctnttgataanaatccttgtncttgctnntganccntcgattcgaattcggcacgagggcaagtttccaaagatcagtgtggagtgctacagaaataattataggagaggaaatcataatcacagaaggtataatgcttgtttgaggctccggaataagaactaaaaaaaaacaaaaaacactggtttcatgcttacggggtacacactttggtgcatcccgtgaacacaaattttaataccaaacaatccttgatgcttcacctggggctgccaagcagtttgtaaaacagaggaaaacatttagtgcagtctgtattatccttttccaacttttctgtttgtgcaagtttttgaagattcattggccaaacaatgaacaacaaaggttttctgagagaagacaaggtggacttttcattttgttagtaaataccagtggcactgttgaacgaaacaaatacttttatctcagtctttcaaatcagtattaatgtctgtgtttccttccactgacagctcttcttctagtttcactgaaaaaagggtgttagtatttttatcttggacactctcttccaaatccttcagcagctcctcttctttatattctgccacatcgacctctaaaccggaattgtccttcagtttgccgtggtgcttgagatantacccgctggttctgaaagaacttgatgatggtgtactttgggaaggtcnaactgggcanacagagtctggatt

SEQ ID NO: 664 - DNA, 785 bp, Homo sapiens
  misc_feature (1)...(785): n = A,T,C or G
gtnnnnccncnnaccctnntgaatntaatccttgttcttgctgcatgatcccatcgattcggtcaagctggccctggatgtggagatcgccacctnccgcaagctgctgtagggcnaggagtgcaggctgaatggcgaaggcatatggacaagtcaacatcnntgnagngcagtccaccgncttcagtggctatggcgntgccagcgntgtaggcagcngcttaggcctgggngnnggaagcagntactcctatggcantngncttgncnttggatgcngcnntagtnccagcagcggnanagccactgggggtggcctnagctctgtnggaggcggcagttccaccatcaagtacaccaccacctccttctccagcatgaagagctacangcactgaantgctgccgccagctctnagtcccacagctttcaggcccctctctggcagcatagccctctcctnangttgcttgtcctnccctgncctccantctcccctgccctaccgngnagagctgggatgccctcactttntnctcatnaatacctgtttcactgaactcctgttgcttaccatcatgtcncagttatcagcactnaaancatgctaatgnccttttataagncccngtatttattacaagnatcttgaantctgccattaaattcttgaggaangaaaatgacctattatcccccataaagaacctgaaacttcaagnctaangtcccagcntncaacanggaaggagntccntttttttnattngctaaaccantcctc

SEQ ID NO: 665 - DNA, 763 bp, Homo sapiens
  misc_feature (1)...(763): n = A,T,C or G
ggnngntgnnnntnntaattnctnttnaatnncantccttggntctngntntaggancccatcgattcgctgaaccctaaaggaaagccagcaaaccagctgcttgctctcaggactttttgcaattgttttgttggccaggcaggacaaaaactcatgatgtcccagagggaatcactgatgtcccatgcaatagaactgaaatcagggagcaataagaacattcacattgctctggctacattggccctgaactattctgtttgttttcataaagaccataacattgaagggaaagcccaatgtttgtcactaattagcacaatcttggaagtagtacaagacctagaagccacttttagacttcttgtggctcttggaacacttatcagtgatgattcaaatgctgtacaattagccaagtctttangtgttgattctcaaataaaaaagtattcctcagtatcagaaccagctaaagtaagtgaatgctgtagatttatcctaaatttgctgtagcagtggggaagagggacggatntttttaattgattagtgtttttttcctcacatttgacatgactgataacagataattaaaaaaagagaatacngtggattaaagtaaaaattttacatcttgtaaagtggtggggaggggaaacagaaataaaatttttgcactgctnaaannnaaannactttccagcnaanctaaaaaactnnancctttaaactatantgagttcgnanaccnggnccn

SEQ ID NO: 666 - DNA, 759 bp, Homo sapiens
  misc_feature (1)...(759): n = A,T,C or G
nnttnnatannngctcttgttctttttgcaggatccctcgattcgtctagacctctgacatcatggtgttttcttaatgcctcacattgctggcacggggatgtgccctgcctgccagcacctaggacttcgagttgggttgcagcttatgacatgcatgataggttttggaaggtaacttttaactgcaaacctataaagtactattttttattttataaatgaacagggttttaacgtgctcaactttaatttttttcaattgtatgaaggccttaaaaaagctacattaagcgtagctaaaattatttattggactaaaaactaacagaacttcatttccagaatttttttttttggcaaatgtttacattcaattaaggggaaaaagtagaaccagcacaaatgagtggcagttgctggagcataactgcttcaataaatcttcatcttggggtaattacaggcaagtcattttcacatcctcttgaggttcagagcatcagaatgaactctatgaatacatgtgtaagtgccagacagctgaatctttatcaggtattgnaaagatacacatatgatatgnttattaaaattgaaataatgtaaaacacatgaataaatttgcaaaaccaagatcacagtccaccatatgcactctggtaccttaaattttttttataaataattnaaaagggaatattggaagcttcttaaaaaaaaaaaaaanaaaaaactcgagcctntanaacttttgng

SEQ ID NO: 667 - DNA, 760 bp, Homo sapiens
  misc_feature (1)...(760): n = A,T,C or G
ggnnttnaaactnctaatnctgtnttgcaggatcccatctatncntatanangctctaggcggngcggntcccactctcggaaccttgtcctgtttgtcccccagctcggcaagcgccatatgagcctggcggcgccagatgcgaatcctgttctgggctttttggcctattcccgcccctcagtcttgccgggatggcaccgcccgcataggacttccagggttgggctgantgggagttcgactgctgggcctcgtaattctcgctttggggctgctccttccaggctgggacacactggggcccgctgtcggtctcccgtcctccgacatcttgtctggaacttccgcctggcagtctccagtaggagtggagctctgtgcggcgtantttggtggaaaaacnggccttgcgtcggcctcacccccagtgtttgtgtttcagaatgaagactattctcagcaatcagactgtcgacattccagaaaatgtcgacattactctgaagggacgcacagttatcgtgaagggcccagaggaaccctgcggagggacttnaatcacatcaatgtagaactcanccttcttggaaaagaaaaaaaagaggcttccggtttgacnaaatggtggggtaacagaaaggaactggctacccgttccggactatttgtaagtcntgtncagaacatgatcaaagggtgttacactgggctttccgttacaaagatgaangtctgngnatgcttaatttccatnaan

SEQ ID NO: 668 - DNA, 763 bp, Homo sapiens
  misc_feature (1)...(763): n = A,T,C or G
gntctatgtggctctngttnttttgcggatcccatttgacgccttggcacgagaagaaaacccatggaaagtagcagtgttgtgagttgcagagacaggaaagatagaagacgttccatgtgttattctgatggtcgaagtttacatttggaaaaaaatggaaatcacacaccatcctccagtgtgggcagctctgtagaaattagtttagaaaattctgaactgtttaaagatttgtctgatgccattgagcaaacctttcagaggagaaatagtgaaaccaaagtgcgacgtagcacgaggctacagaaggatttagaaaacgaaggtcttgtatggatttcacttccacttccttccacttcccaaaaagccaaaagaagaacaatatgtacatttgacagcagtggatttgaaagtatgtctcccataaaagaaactgtgtcctccagacaaaaaccgcagatggcacctcccgtctcagatccagaaaacagccagggccctgctgctggttcttccgatgaacctggtnagaggaggaagagcttttgtatatctacacttgcaaatactaaagccactttccagttnaaaggctnccggagaagatcctctctttaatggggaaagggagagagctctcttgactggccttgggaaagggattggaacataatggggagaaaagaaagccgtaattgacattttctggcanantcttgtnancaagaggggnaaagtnacccttntntgcttgaaa

SEQ ID NO: 669 - DNA, 754 bp, Homo sapiens
  misc_feature (1)...(754): n = A,T,C or G
tgnttctaatgctngctctcgttctttctgcaggatcccatctattcgaattgatgagccttattaactatcttttcattatgagacaaaggttctgattatgcctactggttgaaattttttaatctagtcaagaaggaaaatttgatgaggaaggaaggaatggatatcttcagaagggcttcgcctaagctggaacatggatagattccattctaacataaagatctttaagttcaaatatagatgagttgactggtagatttggtggtagttgctttctcgggatataagaagcaaaatcaactgctacaagtaaagaggggatggggaaggtgttgcacatttaaagagagaaagtgtgaaaaagcctaattgtgggaatgcacaggtttcaccagatcagatgatgtctggttattctgtaaattatagtttcttatcccagaaattactgccttcaccatccctaatatcttctaattggtatcatataatgacccactctttcttatgttatccaaacagttatgtggcatttagtaatgggaatgtacatgggaatttcccactgacttacctttctgtccttgggaagcttaaactctgaatcttctcatctgttnaaatgtgnattaaagtatctacctaactgagtngtgantgtantgaaagaaaggncatatnttaaacnttgaatttancaagcccacnctcgnattttatgncctttcttttgcctngggattgaanc

SEQ ID NO: 670 - DNA, 752 bp, Homo sapiens
  misc_feature (1)...(752): n = A,T,C or G
tgnttctaatanttgctacttgttctttttgcaggatcccttttgacgnctttggcacgagaaagaaagggctcgtgacagagaaagaagaaagagaagtcgttcacgaagtagacactcaagccgaacatcagacagaagatgcagcaggtctcgggaccacaaaaggtcacgaagtagagaaagaaggcggagcagaagtagagatcgacgaagaagcagaagccatgatcgatcagaaagaaaacacagatctcgaagtcgggatcgaagaagatcaaaaagccgggatcgaaagtcatataagcacaggagcaaaagtcgggacagagaacaagatagaaaatccaaggagaaagaaaagaggggatctgatgataaaaaaagtagtgtgaagtccggtagtcgagaaaagcagagtgaagacacaaacactgaatcgaaggaaagtgatactaagaatgaggtcaatgggaccagtgaagacattaaatctgaaggtgacactcagtccaattaaaactgatctgataagacctcagatcagacagaggactactgttcgaagatttttggaagaatactgagaacggcataaagtgaagatcgacatttaaaaaatgaggtgaaagaaagctnttgtggcatagaaaaagtnttaagctcaantagtttttttattattattattattaaaagttattcaggactgatgtgactncngatttnagaacatgtggtaatagtntant

SEQ ID NO: 671 - DNA, 752 bp, Homo sapiens
  misc_feature (1)...(752): n = A,T,C or G
tgnttctaatgttgctactcgttcttttgcggatcccatnttattcgaattcggcacgaggatattcacacagtatgtattatattaaccatatcacacttaagttattaaattcagactatttgtaacttattgttatagggcctgccgtatggcttaggatatttgagtaatcatatatttaaagtaaaaactttgggctgggcacagtggctcacacctgtaatcccagcacttggggaagctgaggtgggcagatcagttgaggtcaggagttctagaccagcctggtcaacatggcgaaaccccatctctactaaaaatacaaaaattagctgggcgtggtggcacacacctgtaatcccagttacttgggaggctgaggcacaagaatcgcttgaacccgggaggcggaggttgcagttagccaagatcgccctgctgcactccagcctgggcaacagagggagactctgtctccaaaaacaaaaacaaaaactgttagtgaaggttccctgggacttttgatattttaaaaattggtcttatgactagtagataaattcattgccataatgaggctagctcccagataaacagtgtattttcttcttttttttttttggtgagtggtccaaactttaagctactttttccagtantttgccactttctccgangtaantttggctggtctttnagtaatgctaattgngtgtcaaaatttgtctacaacagttnggcaacagatn

SEQ ID NO: 672 - DNA, 792 bp, Homo sapiens
  misc_feature (1)...(792): n = A,T,C or G
tgnttctaatactngctactngttctttctgcaggatccctctattcgaattcggcacgaggctgcttctggctggggggtccttggccttcatcctgctgagggtgaggaggaggaggaagagccctggaggagcaggaggaggagccagtggcgacgggggattctacgatccgaaagctcaggtgttgggaaatggggaccccgtcttctggacaccagtagtccctggtcccatggaaccagatggcaaggatgaggaggaggaggaggaggaagagaaggcagagaaaggcctcatgttgcctccacccccagcactcgaggatgacatggagtcccagctggacggctccctcatctcacggcgggcagtttatgtgtgacctggacacagacagagacagagccaggcccggnccttctgcccccgacctgaccacgccggcctagggttccagactggttggacttgttcgtctggacnacactggagtggaacactgnctcccactttcttgggactttggagggangtggaaccggcacactggacttcttccgtctctanggctgcatggggagccctggggagcttnaatnnttgggggatcccnnaaaangaccccctgtcccccatanacttgggtttttngctttcanccctttccccttggccccnnttgaccacttcatggagtttaattaaaatngcccttggtangaaaananaatantnttcctcnttttantgntnttttnntataatttnatnatcctantnatcntnnt

SEQ ID NO: 673 - DNA, 755 bp, Homo sapiens
  misc_feature (1)...(755): n = A,T,C or G
nttctaatnctngctacttgttctttntgcaggatccctcgattcgaattcggcacgaggcagcttcgagccaatggtgagctccttctggatcagctccttcagctccttcttgctcaggatgctgaaattgcaaggctgatggaagacttggaccggaacaaggaccaggaggtgaacttccaggagtatgtcaccttcctgggggccttggctttgatctacaatgaagccctcaagggctgaaaataaatagggaagatggagacaccctctgggggtcctctctgagtcaaatccagtggtgggtaattgtacaataaattttttttggtcaaatttaaaaaaaaaaaaaaaaaactcgagcctctagaactatagtgagtcgtattacgtagatccagacatgataagatacattgatgagtttggacaaaccacaactagaatgcagtgaaaaaaatgctttatttgtgaaatttgtgatgctattgctttatttgtaaccattataagctgcaataaacaagttaacaacaacaattgcattcattttatgtttcaggttcagggggaggtgtgggaagttttttaattcgcggccccggnngccaatgcattgggccccggtacccaacttttgttccctttantgagggttaattgcnccccttggccgtaatcatggtaatagctgtttcctggtgngaaattgtttcccgtnacaattncacacacttttcancccggggacn

SEQ ID NO: 674 - DNA, 753 bp, Homo sapiens
  misc_feature (1)...(753): n = A,T,C or G
tgcttctaatgcttgctactcgttctttntgcaggatccctcgattcgcagatttttgacaaggaaggctaattctaaacctgaaagcatccttgaaatcatgcttgaatattgctttgatagctgctatcatgacccctttttaaggcaattctaatctttcataactacatctcaattagtggctggaaagtacatggtaaaacaaagtaaatttttttatgttcttttttttggtcacaggagtagacagtgaattcaggtttaacttcaccttagttatggtgctcaccaaacgaagggtatcagctatttttttttaaattcaaaaagaatatcccttttatagtttgtgccttctgtgagcaaaactttttagtacgcgtatatatccctctagtaatcacaacattttaggatttagggatacctgcttcctctttttcttgcaagttttaaatttccaaccttaagtgaatttgtggaccaaatttcaaaggaactttttgtgtagtcagttcttgcacaatgtgtttggtaaacaaactcaaaatggattcttaggagcattttaatgtttattaaataactgaccatttgctgtanaaagatnanaaaacttaagctttgttttactacaacttgtacaaagttgtatgacagggcatattctttgcttncaanattttgggttgggggcactangggttcaaaaccctggcanaattgtcnactttagnctgaccataatnc

SEQ ID NO: 675 - DNA, 760 bp, Homo sapiens
  misc_feature (1)...(760): n = A,T,C or G
tgntttctaaacnttgctctcgttntttntgcaggatcccatctattcgaattcggcacgaggttccctcaccttattcctccaagttcccccttgggaacctctgagattaacttgataagctccttgggcaagctctttatcctaagattcctcagtgagccttatagagttgctgcgagaattacatttgttcatgatgtcaagtgtctggtatgtagctaatgcttattgaacacatagtaatttattgaataattgtcatgatcactggatgagatatagccactgtggaggtaggcacaccagggttttagaggcttgggatcttgcaacaggattttcctcttgcctctccaaactgccctttgcccagatggcttcagcatctttttgcatccctgtttccttgtttggtgaacacctgtctcaacctgtctgcaaggcgtggtgagattctgcatccttggtaagcactcatgtcactccaaaacagctgtttgatgctaatagcacacatgaggtcttgcaaatttgtctgaggaactacaggacattggagagatatttatcaaacacccactacatgcctgatacttaactanggaactatnaaagtgggtggtgaagacaagtgngaagtaaantgcaaacctatttccatatatgtttgnncgctagattgntnccancaattngcntcttggaattgttgaattnggccctgtgtgtgtgcctgtggtaantgganntgngtttc

SEQ ID NO: 676 - DNA, 751 bp, Homo sapiens
  misc_feature (1)...(751): n = A,T,C or G
ntttgaaacttnctactngttctttttgcggatccctcnattcgaattcggcacgaggcagaaccttttcccctctactcttgtctaaaagttctgtgtggcacacagagatgcgacctactcaatctgacttagtaaaaccatgctgtagaatttttgtcttaaaaagaccacatacccagcacccatgaaataaaagattcatctgtaattgggattcaaagtgattaaattcctttgttcatactcataaatagcactaaagtgttataacattttcatttacctatttttagttccttcattttaacttaataaaaatcttggattgatattctttttttttttttttgggacggagtctcgctctgtcacccaggctggagtacagtggctctatcttggctcactgcgagctccgcctnccgggttcacgccattctcctgcctcggcctgccgagtagctgggactgcaggcgcccgccaccacacccggctaatttttttgtatttttagtagagacggggtttcaccctgttagccaggatggtctcgatctcctgacctcgtgatccacctgcctnggcctccaaagtgctggaattncaggcgtgagccaccgcgcccgggnctaaattggatattctttaaccattaaaaggtttactgggtgnccnatttgccatattattggaaacttggaaagggtaatttgaaacaaagntttgaagttaactgaaatttgggga

SEQ ID NO: 677 - DNA, 756 bp, Homo sapiens
  misc_feature (1)...(756): n = A,T,C or G
tgctttgaatcctttgtaancgccctntntgcatgatccctcnattcgaattcggcacgaggataaactcttcagtgacgaatattagaattagttagttatacatttgaggaaaactataaaagtaccaataatgagtaggaaatcacttctgcagtatttttggagcattttccttaagcatgacataaaagccaaaggtcacaagggaaaaaactgatagatttgtctgtgatattgagagatgtatgcacatatacatacaacagtcatagtaagacaccgttagacaaaaggtgatgtatgaaaaagaggcaaaacaacaagaagaaaagattgaaaaaatgagagctgaagacggtgaaaattatgacattaaaaagcaggcagagatcctacaagaatccaggatgatgatcccagattgccagcgcaggttggaagccgcatatttggatcttcaacggatactagaaaatgaaaaagacttggaagaagctgaggaatataaagaagcacgtttagtactggattcagtgaagtttagaagcctgaaacttttctcgtatggggtggtttttgcattaaatnctggggtccattttacaatccattatttttgaccactgctatgtgttcaagtagtatgagaatgtgattgntnttatctggntcatatatatttctttggctaatttaatatgtcaaataaatgagttcatttaaaaaaaaaaaaaaaaacccggactgttttnt

SEQ ID NO: 678 - DNA, 756 bp, Homo sapiens
  misc_feature (1)...(756): n = A,T,C or G
gnnnnnnnnnnnnttnnaatagnnagctacttgttctttttgcaggatcccatcgattcgaattcggcacgaggggtgttggagcagattgtagttgatccacagcaaagagcatcaccaaagccattccaggaggaactagatccaccacttcctctgctgggcatgctccaaaaatggttgtggcttccagagaggactccaaaagaaagcacaaaaactagacagtgggagggcatacccaaaagccctgagtttctgaaaaaatattgaaagtttctatggtgaaataggaagttaatgtgcttaggaagaaaaaagtggtaatgattcaaggaaacataatcacacacggttttagttttaatggacatgggaggagccataaaagtagtctatctatcatcagttacatatctaatgaactgtctatctgggataccctatcctgttttaatctgagtgactctctctcagctgagagagctggacagactccattttagcctcttcacttgcagtccccttatccccctcccttaagggaataactagtgcaagctgacttcaagcacattcaggaatgcacttactgataagatattgaggcaagctgtaccagcagcttctgggggacctgctcantggatggtcccaacccctgcatttatctctttgggatagtttaagcccctgnacctggaactgngtatttttctgtactatctctgtancattaatttttttactttttgg

SEQ ID NO: 679 - DNA, 747 bp, Homo sapiens
  misc_feature (1)...(747): n = A,T,C or G
tctaatncttggctctcgttctttctgcttgatccctcgattcgaattcggcacgagaaatgactccctgcaaaacccaacccatgctgctggctgtgggatttttggtgtaagcctatctatgcactctatcagccagaatttggcatttagctcttagttaaatctagtaaaggacagtctattgtttaaagagaaggtgcatttgttcctcaatcaagcaagagcacctgtgttgtactgctttatatctcatgtatatttatagtaatgaaaagactttttaaattgtacacgtttcagtgcctttcttgtgttatgaaaggcaggtagatattatagccataggtaaaaatccatagttaaattgcacactgaccttaaatctctctgtgtatgcccttgtatcttgcatgttaaaagttggattattgggcatgtgtggcagcctgccctgctacatgctagacaagtgtgctttagtacatagccacaagttcttcattctttaaaatgttttgacagatcatctcataataaaaataattcangaaaactatggggaaatagttacatttcacaaaagatattttaaactctttgtaaaacttagataatagagcctancaagttactttgnatctaattggatacattttatgnttaattttaccaccatacattttattaatcaaaattggttagcatgtgactctttttggcttcanaagttntcaaaaaaattat

SEQ ID NO: 680 - DNA, 750 bp, Homo sapiens
  misc_feature (1)...(750): n = A,T,C or G
ttctaatncttggctctcgttctttctgcangatcccatcgattcgaattcggcacgaggaccggctgggcctacaaaaagatcgagctggaggatctcaggtttcctctggtctgtggggagggcaaaaaggctcgggtgatggccaccattggggtgacccgaggcttgggagaccacagccttaaggtctgcagttccaccctgcccatcaagccctttctctcctgcttccctgaggtacgagtgtatgacctgacacaatatgagcactgcccagatgatgtgctagtcctgggaacagatggcctgtgggatgtcactactgactgtgaggtagctgccactgtggacagggtgctgtcggcctatgagcctaatgaccacagcaggtatacaagctctggcccaagctctggtcctgggggcccggggtaccccccgagaccgtggctggcgtntccccaacaacaagctgggttccggggatgacatctctgtcttcgtcatccccctggganggccaggcagttactcctgaggggcttgaacaccatccctnccactagcctctccatacttactcctctnacagcccaaattcttgaaagttgtctcccttgacccttctttaatggcaacttaactgaanaaagggatgtncncttatatccaaaattcagctatttggcaaataaaccanatggattaaaaaaaataattntntcttaananaaanaactccggcct

SEQ ID NO: 681 - DNA, 748 bp, Homo sapiens
  misc_feature (1)...(748): n = A,T,C or G
ctaatncttggctctcgttctttctgctngatccctcgattcgaattcggcacgagcccagctgctcaggaggctgaggcaggagaattgcttgaacccaagaggcggaggttgtggtgagccgagattgcacctttgtactccagcctgggcaacgagcaaaaaactctgtctcaaaaaaaaaaaaaaaaaagaaaaagaaaaatggcttccaggacagagcatgctcatttgctggcggacagttccagaaacagaccctgttagtccttctacttacctgctggatttttcaagcactaaatttataactttttgaaacaaaataatgtgtaattttccatttgggggcaaactctattcttgtgagcattattaaaatcttgtttgtaaatatattgtctttctcttaatatttgctctgggtcangaagaagctgttcacggtgtgataatactctttanattgtgctttcattattatagatgcatcatgtcttctgctttcacgtgtctgggatggggtcagaaatgcatnctccagntgacanaaaaatccnagnatgagatcaanaaggatactggtgttttctgacttttacaaaaattactttgntgttttcattaaaaaaaaagctttaacctantgnttncntantccttttagaaantattaaatttnaaaatgaattcnatanaaatanaannacnaaaaaacttnntncctttanaactttagtgangcgtn

SEQ ID NO: 682 - DNA, 755 bp, Homo sapiens
  misc_feature (1)...(755): n = A,T,C or G
ctaatgctnggctttcgttctttctgcaggatccctcgattcgaattcggcacgagcaggagcaatcaattcctgtcgaagtgaataccatgcagcttttaacagtatgatgatggaacgcatgaccacagatatcaatgcactgaagcggcagtactctcgaattaaaaagaagcaacagcagcaggttcatcaggtgtacatcagggcagacaaagggccagtgaccagcattctcccgtctcaggtaaacagttctccagttataaaccaccttcttttaggaaagaagatgaaaatgactaacagagctgccaagaatgctgtcatccacatccctggtcacacaggagggaaaatatctcctgtcccctaccgaagaccttaagacgaagctcaactncccgtggcgaactnacatccgagtccacaaaaagaacatgccaaggaccaagagtcatncgggctgtggggacaccgtanggctgatagatgagcagaacgaggccagcaagaccaatgggctgggggcagcagaggcattcccctttggntgtcangcgacagctgggagagaangcaagnaagccctgaangcnagtccaggaggaccnncnaagggcagtttccggagcccgntgttccggagatgctgatgtgggntgtgtctgcanttcanggccaaanttggggacccctgggaactgtaccctangggntncttgnagnttaaaacttgaccttaanggnngcct

SEQ ID NO: 683 - DNA, 755 bp, Homo sapiens
  misc_feature (1)...(755): n = A,T,C or G
ggntttnnntctttctaatgcttggctctcgcctntctgcttgatcccatcnattcgaattcggcacgagaattagtatcaacttacaatccaagtccaagtatcatcttataatcacttttttctactatattaagatctaatgaatttgatttcttttttgaagttttttcttgtaacatctgagattagaagtttaagatcacttgaccccaaacctttgtttatgtaagaatttttaaacataaaagtgtttgtttctgttatgttaccataatttgatgtatatagtgtccagatccatttagaaatttaatatttattaataactgaaactgtttgtcttcctttggtatatagtctcgcatattatattatagcaggccaagataaaattttgacagctctttaagcccacatgcagcagtgggtcagataaccctgtggcagtgacacgggcaaattggcatttgaataaagccctgggaccacctcaacatgcgtagcctcttgtcttaaatgtactccccatggcagcatggaggaggcaagacctgtgggtcaattttgaactggncttactttgattttaaaacaagagactcaggggaaagtactaaaccaaaaactctgattntactttgcgttttctggaagtnnttggtttactgagatgcttttgtaaaggaaaataatgcttgngacantttagtaatttctacanaattcnttaatatttcttcctcntgggcttn

SEQ ID NO: 684 - DNA, 774 bp, Homo sapiens
  misc_feature (1)...(774): n = A,T,C or G
ggntttnannctttnnaatncctttgctnctcgntctttntgctggatcccatcgattcgcaagatctggaggaatgcagagaggaacttgatacagatgaatatgaagaaaccaaaaaggaaactctggagcaactaagtgaatttaatgattcactaaagaaaattatgtctggaaatatgactttggtagatgaactaagtggaatgcagctggctattcaggcagctatcagccaggcctttaaaaccccagaggtcatcagattgtttgcaaagaaacaaccaggtcagcttcggacaaggttagcagagatggatagagatctgatggtaggaaagctggaaagagacctgtacactcaacagaaagtggagatactaacagctcttaggaaacttggagagaagctgactgcagatgatgaggccttcttgtcagcaaatgcaggtgctatactcagccagtttgagaaagtctctacagaccttggctctggagacaaaattcttgctctggcaagttttnaggttgaaaaaacaaaaaaaatgacatgggtgcagaagcttgtaacattgatcacattcttaatgtaaatggtgtctttcttctggggtttcagtatttgcaaagaaantgaagaagaattctggaaatgccattcaattaaccctnaggaaaaaagccgaccttanaaatttaccttantgcnttgnnnnttaaaaanaaaaaaaantnaaaaaactttnaccctttanaccttttgtggggnc

SEQ ID NO: 685 - DNA, 759 bp, Homo sapiens
  misc_feature (1)...(759): n = A,T,C or G
ggntttnnannctttctaatncttggcttnagttcttttgcaggatcccatcgattcgaattcggcacgagagtacccagagttgcgaggagttttttaactgatttagccnnntggcaatcatgagtgaatggatgaagaaaggccccttagaatggcaagattacatttacaaagaggtccgagtgacagccagtgagaagaatgagtataaaggatgggttttaactacagacccagtctctgccaatattgtccttgtgaacttccttgaagatggcagcatgtctgtgaccggaattatgggacatgctgtgcagactgttgaaactatgaatgaaggggaccatagagtgagggagaagctgatgcatttgttcacgtctggagactgcaaagcatacagcccagaggatctggaagagagaaagaacagcctaaagaaatggcttgagaagaaccacatccccatnactgaacagggagacgctccaaggactctctgtgtggctggggtcctgactatagacccaccatatggtccagaaaattgcagcagctctaatgagaatattctgtcncgtgttcaaggatcttattggaaggacatcttacagcttccaatgagaagccaagaagttgtgaacatactgattgaaaaaagactttattttaatccctcattaaaanggttttaaatgttaaaaaaaaaaaaaaaaaacttcgagcttttaaactatngtgagtcgattcntataa

SEQ ID NO: 686 - DNA, 749 bp, Homo sapiens
  misc_feature (1)...(749): n = A,T,C or G
ggnnttnnnnnctttgaaatcccttngctnctagcnctttttgcaggatcccatcgattcgaattcggcacgagggcaattagcctcgcttaagttgccttttttacacaccaaaactttttacatgaagggctggtttcacatgaatactatactgaaatctgtgctctcaagatctagcagtgaccagggctgcccggcgggggctctcctggcaagtcaggaaggtttctgttgctaatataacatagaaacacattagtgcactgggcctctctgaggtcagcatatttgtactcttggaatatttgtttttttcttcagtaacaacagaaaccccagttgggagtttaacaaataactgactaccactcactcatgcatttttatttccaattaaagcaaagcactgtgctgtgctcagataataatagtttgtaagtaaaagtttttagttttcagtgttcaggttatagaatataactgaccataaaaattacctgcaggtattttctttttatgaacttgtttttaaattaccaagtaattactggtgtcattttgttttatgacagacacacgtatctaacaaacaaacaaacagtgaccttctccatgggtcaaggacttccttacaatttctnctgagttaacttttgtgaaaataatcctaaggttttctggcttattgaggaaattnctacaaacaacaaaccaacaacngaagagaagatcatcaaccactgttt

SEQ ID NO: 687 - DNA, 760 bp, Homo sapiens
  misc_feature (1)...(760): n = A,T,C or G
ggnnttctaatgctttctaataccttggctctngctctttctgcaggatcccatcgattcgaattcggcacgaggaaatgtgtatttcagtgacaatttcgtggtctttttagaggtatattccaaaatttccttgtatttttaggttatgcaactaataaaaactaccttacattaattaattacagttttctacacatggtaatacaggatatgctactgatttaggaagtttttaagttcatggtattctcttgattccaacaaagtttgattttctcttgtattacattttttatttttcaaattggatgataatttcttggaaacattttttatgttttagtaaacagtatttttttgttgtttcaaactgaagtttactgagagatccatcaaattgaacaatctgttgtaatttaaaattttggccacttttttcagattttacatcattcttgctgaacttcaacttgaaattgtntttttttttctttttggatgtgaaggtgaacattcctgatttttngtctgatgtgaaaaagccttggtattttacattttgaaaattcaaanaagcttaatataaaagtttgcattctactcangaaaaagcatcttcttggatatgtcttaaaatgtatttctgtcctctatacanaaaagttcttaaattgatttttacagtctggaatgcttggatgntttaaaatantaacattttatattttttaaaagacaaancttatattnatcctng

SEQ ID NO: 688 - DNA, 752 bp, Homo sapiens
  misc_feature (1)...(752): n = A,T,C or G
tgntttctaatgcttctaatagcttggctctngttctttctgcaggatcccatcgattcgaattcggcacgagacaaaacctacagatggagataaaaattactactgttattcaacatgtgttccagaaccttattttggggagtaaagtcaattgggcagaggatcctgcccttaaggaaattgttctgcagcttgagaagaatgttgacatgatgtaataagaattcatttctgacatattttacatttctggcaatctcaactcttatttggaatacttctgtgcatttgtctgtccaccgtaattttagaaaagcatatccataacgtttacagttgtagtacagttgtggttagttatttgtagtgggattgaaagtaatttttttctttttatatttctatatttagtttgtttttttgttgttgttgttttttgagatggagtctcgctttgttgcccagactggagggcagtggcgcgatctcggctcactgcaacctctgcctcccgggttcaagcagttctgcctcagcctnccaagtagctgtgactaaaggtgcacgccgccatgcccanctaattttttggattttaagtagaaaccgggtttcacccgtgttgcccaagctgctctnaaaactcctgagctcaagcagtccacccgncttngctaccggantgctaggattcagacgtaagcccccgaancctggctagtttgcnttnttttctntcattttataag

SEQ ID NO: 689 - DNA, 806 bp, Homo sapiens
  misc_feature (1)...(806): n = A,T,C or G
gtgntttctaatgcttctaatngcttggctactcgttctttntgcaggatcccatcgattcgaattcggcacgagganntctntgctatngaacagnggctggtnnacactnngganttannnntgnacnntannnattgnancanntantactggnnntccntaatncnnttaatgtnacntnttgcaagnngnnctgatnaaatacacgacaggagggaaanctantgcgtcataggcacaggcagacctaccgnntaaggagatnatntnccnnanggntggctgttgagnncatgcaactctggnatgtatttccctttataggaccaccttgtncatngtggataaagcccctaaagnaggatgnnaaagatgatcngatccaatacgttacnctgacannaaannntgtnatacntcngctgancaatctntccancnnntntaatatcgtgnatcacctagggtgtatgatcntaggaactctgcncctncantcnggactgtccatcacngactnntgggctnctactgtacantangcgnagaanancnntcannctacanntaaccagattggtgctgnnanatggtantgcnntttnancncccacgacncaataaagnncnnctntnccccanancctntnnagggaagaaaggaattttncatagtgggctcaatgaanggggtacccttggnctttntaaaaaacgttncatggnncctaccttaaacctgngtnaactnanancnnttngncataangggtctaacgnctatanggggnacnnatttttnc

SEQ ID NO: 690 - DNA, 772 bp, Homo sapiens
  misc_feature (1)...(772): n = A,T,C or G
ntntttgaatctttgaaatacctttgctatngttctttntgcaggatcccatcgattcgaattcggcacgagaggttgctcacctgaaggagcacaggagggttttccaggccatgtggctcagcttcctcaagcacaagctgcccctcagcctctacaagaaggtgctgctgattgtgcatgacgccatcctgccgcagctggcgcagcccacgctcatgatcgacttcctcacccgcgcctgcgacctcgggggggccctcagcctcttggccttgaacgggctgttcatcttgattcacaaacacaacctggagtaccctgacttctaccggaagctctacggcctcttggacccctctgtctttcacgtcaagtaccgcgcccgcttcttccacctggctgacctcttcctgtcctcctcccactncccgcctacctggtggccgccttcgccaagcggctggcccgcctggccctgacggctccccctgaggccctgctcatggtcctgcctttcatctgtaacctgctgcgccggcaccctgcctgccgggtccttgtgcaccgtccacacgggcctgagtttggacgccgacccctacgaccctggagaggaggacccagcccaagacccgggcctttggaaaacttccctgtgggaagctttaagnnccttcnanangccacttacccaaccttgaggggntccaaangcccgccanccggtnattaaccaaggccctggncaatgcctgaaggtcaaacaatn

SEQ ID NO: 691 - DNA, 755 bp, Homo sapiens
  misc_feature (1)...(755): n = A,T,C or G
ntgctttcnaatctttntaaatgcctttggcttctcgntctttctgcaggatcccatcgattcgaattcggcacgagaaaaagtaaagcttttcatgagcacaaatnccttgcattgtttgatgttactgatattcgtaaaatgaatattttttgttttgttttgttttatttttttgagacaagtcttgctttgttgcccaggctggagtgcaatggcatgatcttggctcactgcaacccctgccttgcgagttcaagtgattcttctgcctcagcctcctgagtagctgggattacaggcgctcaccaccacacccagctaatttctgtatttttagtagacacagggttttaccatgttggccaggctggtctcaaactcctgacctcaaactcctcacacctgtaatctcagcactttgggaggctgaggtggaaggatcacttgaagccagagtttgagaccagcctgtgcaacacagcaagaccccgtctctacaaaaacttaaaaaattagctggctgtggtgttgctcacccatagttccagctactcgggaagctgagcantaagatcacttgagcccangaggccnatgcttncantgaactgtgattgtttccantacagnccacctgggtgacanagtaaanaaaangaaacattacataatttggctagagcataataaattgatttctgggttntgaaattnnagttgccataaaaggnntttnaatgngcnanttcant

SEQ ID NO: 692 - DNA, 748 bp, Homo sapiens
  misc_feature (1)...(748): n = A,T,C or G
tgnttttaatcnttctaatncttggctcttgttctttttgcaggatccctcgattcgaattcggcacgaggtccgaagaaaaagactgtggtggcggagatgctctctccaatggcatcaagaaacacagaacaagtttgccttctcctatgttttccagaaatgacttcagtatctggagcatcctcagaaaatgtattggaatggaactatccaagatcacgatgccagttatatttaatgagcctctgagcttcctacagcgcctaactgaatacatggagcatacttacctcatccacaaggccagttcactctctgatcctgtggaaaggatgcagtgtgtagctgcgtttgctgtatctgctgttgcttctcagtgggaacggactggaaaacctttcaacccactgctgggagagacttatgaattagtgcgagatgaccttggatttagactcatctccgaacaggtcagccatcacccaccaatcagtgcatttcatgctgaaggattaaacaatgacttcatctttcatggctctatctatcccaaactgaaattctgggggaagagtgtagaacagaacccaaaggaaccatcaccttggagctncttgaacacaatgaggcatatacatggacaaatccacctgctgtgtgcataatatcattgngggtaaactgtggatcgaacagtntggcaatgtggaaattntaaccncagactggggacaaatntgtgttg

SEQ ID NO: 693 - DNA, 881 bp, Homo sapiens
  misc_feature (1)...(881): n = A,T,C or G
tgnnnngtnaaccagggaaaagctnngtttgaactccttgggcatgatcccatcgattcgaattcggcacgaggcggtgacccacgtgtccttttgattgccctactgctgtggagacctcgtgctgaccatctggcagtgntcttcgtattctctggcctgtggggcgtggcaagatgcccgtctggcagacacaaaacaatgctctctacggcgttctgtttganaagagcaaggaagctgccttcgccaattaccgcctgtgggaggccctgggcttcgtcattgccttcnggtacagcacgttttngtgcntgcacgtcaagctctacattctgctgggggtccngagcctgaccatggtggcgtatgggcttgtggantgcgtggagtcccaagaaccccgaatcanacccnactctttcaggacaggtcaancaagtcagaggatgaagaanattcanacaaanatgtgatanccngngaggccnaangaggannaantnataaaagcaccagccagaagaattttcttanaanatgcctnagggacatatcanccggggttctcattacccatcttaancnccanatttngncccattcttgaaataagantcnttgnttnaattntcaacttctttttatggtnatttcnatntatctanttantaaaaccacaaatntgttnncnatnaccaccanttcttttaaaccatntagnaattcaaangntgtgtnnttacnaatntntaangggttattcaaanttcnaaattttaaanattnttatgcantncncacaatntatataananggtcctnaaaacgngnnccaatatnncannncnataatntagnanatntntnnnccntgtann

SEQ ID NO: 694 - DNA, 742 bp, Homo sapiens
  misc_feature (1)...(742): n = A,T,C or G
atngcttggctctngttctttctgcaggatcccatcgattcgaaaatttatagtaatgacaaatgacttatcagtgttcatcatctgaaagctaagtggttcgttcaatcactttttcaaagttgatagtagattgcatggtttcatgtttcctcatattggtttattaattctatttaatcaaggaaaataacttcagattccataaagtttcagtttatttttagtttactactaggtgagatagcacattacatacttttactatcaaatattattttagcagcttcccatagtaccaaatgatttgattccctactctcattttttaaagcatataaatatttatgggcttaaaaagggggtttttaaaaactgaggatatcantaataaattgcagaatattttgcaaagctttcttttggaaagcaaacttttgtgcctgcctatatgcnaagtattttatcagggacttgaacaaagacctcactctttttcacttgtcttatgtcgagagaaaaggttattggcagncacattcctaanactggggaatggtgtgtncttttnaaatttgaagataacttttagggtaattatggaaactcctcaaangaggganaaagtnatttttttccagacatttttcctcaattctgggtctttcacacactanntttccatagtncnagaatttctgnntttttaccatttgggctgtgaaatgttcacaatntcnng

SEQ ID NO: 695 - DNA, 745 bp, Homo sapiens
  misc_feature (1)...(745): n = A,T,C or G
tttcaaatngcttggctacttgttctttttgcagggatcccatcgattcgaattcggcacgaggctagacgaagtggtgaagcccaaagacttatttttgagctcgctgtaagactgagaaatcacgtagtccttcctgaaaccactaagaggaaaaatgtctgtgacactgcatacagatgtaggtgatattaaaattgaagtcttctgtgagaggacacccaaaacatgtgagatggagtctcgctgtgtcccccaggctggagtacaatggcgcgatctcggctcactgcaacctccgcctcctgggttcaagcaagtcttctgcctcagcctcccgagaactggaagaggaggcaacagtatttggggcaagaagtttgaggatgaatacagtgaatatcttaagcacaatgttagaggtgttgtatctatggctaataatggcccgaacaccaatggatctcagttcttcatcacctatggcaaacagccacatttggacatgaaatacaccgtatttggaaaggtaatagatggtctggaaactctagatgagttggagaaagttgccagtaaatgagaaagacataccgacctcttaatgatgtacacattaagggccntaactattcatgccaacccatttgctcagtagctattgatnganctggacaaattactttgnccaaattgctngaacacactttattggggggttaccccgnttttaattatgtcanaa

SEQ ID NO: 696 - DNA, 795 bp, Homo sapiens
  misc_feature (1)...(795): n = A,T,C or G
tttcaaatngcttggctantngttctttttgcaggatcccatcgattcgaattcggcacgaggctggccaaagccaaatctcctaagtccaccgcccaggagggaaccctgaagcctgaaggagttacggaggccaaacatccagctgcagttcgcctccaagaaggggtccatggccctagtcgagtccatgtgggctctggggaccatgactattgtgtccggagcaggacccccccaaaaaagatgcctgccctagtcattccagaggtgggctcccgatggaatgtcaagcgccatcaggacatcaccatcaaacctgtcttgtccttgggcccagctgcccctccgcccccatgcatanctgcctcccgggagccgcttgatcacaggactagcagtgagcaggcagatccctcagcaccctgccttgccccatccagcttgctgtcccctgaggcctnaccctgccggaatgacatnaacactaggactncccctgaaccctcagccaagcancggtcaatgcgctgttacccgaaaaagcctgcaggtcaagccagccccttaagccagggcttggcangggcccgccnaaggccgnaacaagaccgntctgtnaactcttgggttccaaacccggaactttgcccgaaagcatttntttcccttaattccttcaattcaatccggnctttccttaatttccnggattcttngggtccaagggtccccttttttcccccccaanaacaaagaaaaggttgggcccgaaanggtcccaaccttnttnnt

SEQ ID NO: 697 - DNA, 734 bp, Homo sapiens
  misc_feature (1)...(734): n = A,T,C or G
ctaatagcttggctactcgttctttntgcaggatcccatcgattcgcagccctcttccctcccctgtcaagtcacttaccatgcaaaccacaggctctaagagtttgtccccagggacatccatccaagtcatctccatggctcctgggtcccctggtgagcatggagtcaggaggtcatcaatcatcatgctggggttggtgcgagaggggccacagacctgaaaccaaatggatctgactggggcagctgcccctcagtgtcagaggggctcgacccctccggtctctaaggaagtcccaaagagaatgctctgtgggtccctagcatctgaggaggacgggctccttcagaactcgggctgggtggtccgagcgactcatgatttgcatgggactctggcaatctgtagccccaatgccttgatgtcttcctcattaacactgtcacgtctcaccaggaatacagtgacattaaaagtgtgatatggtntagctgtgcccccacccacatttcaacttgaactgtatctatctcccagaattcccacatgttgtggganggacccagggggaggtaactgaatcatggnggctggtcttttcccgtgctattctcgtgaatngtgaantttnacgagatctgatgggtttatcaggggttttccaatttttggttcttatttttctnttgcaatctgcatttaagnaantgccnttnggtctctaacantn

SEQ ID NO: 698 - DNA, 728 bp, Homo sapiens
  misc_feature (1)...(728): n = A,T,C or G
ttcnaatngctnggcttttngttctctttgcaggatcccatcgattcgaattcggcacgaggtttaatttaaacctctcatctttttttaagcactcactgantttgaccgagacagccagtcgccgttgaggaatcctctgttgtcaacatcgagacccctggttttcgggaaacccaatggtgatgcagttgattatcagaaacagctgaagcagatgattaaggatttagccaaagaaaaagataaaactgagaaagaattgcccaaaatgagccagagagaatttatccagttctgtaaaactctgtacagtatgttccatgaagatccagaagaaaatgatttgtatcaagccatcgccacagtcaccacactgctgctgcagatcggggaggtggggcagcgaggcagcagctctggaagctgctcccaggagtgtggggaggagctgcgggcttcagctccttctcctgaggactcggtttttgcagacactgggaagacgccccaggactcccaggcatttccagaggcggcagaaggggactggactgtctcccttgaacatattttagcttcacttctgactgaacagtcattagtcaactttttttgaaaagccactggacatgaaatccaaacttgaaaatgccaagatcaatcagtncaatctcaaacttttgaaatgaccncaatccaatctggacntaagctgagtacttgtn

SEQ ID NO: 699 - DNA, 746 bp, Homo sapiens
  misc_feature (1)...(746): n = A,T,C or G
tttcaaatcncttggctnttngttctttttgcaggatcccatcgattcgaattcggcacgagggaaaaacaacaggtttgagtcctataaagccataatttaactccagtagctgatgtcagacaagcttgtcctatgtcctatttgagtggcagcagcgccagcccagcaagaaggctgggggttgtcaaggttgtccccagaccttgcttgcagtggttggagaacccagggggctgccttgggccctctggccagagggaagcgggcagctctagccctggagattgtggtcacattggggcttgtttaggattggagggccaggtcacctccccagccaccctcccttctctcctctggggtccccactttagggcgactttgcccgagcccacgcatccatccactcctttagtgccttgaatctcattcacaagcagccccctcccttcccctccccttctcactctgttgatgtaatcctnccacccccagtgtccatcctaagacaggcatcaaaaagaggccctaactttacttnccaaatggtgctttttaaaaaacaccatcactacattangggcaattttttcacaccttcctgtcttcagaatgtaaaagggtgggggaattattgtctctggttaaatntgcacncccttgacttgtgggggttttggggcatgttcanntatttangaatgaattncaattngacaaaagggggtttantnaattgttnt

SEQ ID NO: 700 - DNA, 759 bp, Homo sapiens
  misc_feature (1)...(759): n = A,T,C or G
gntttgaaatccctttgctttnaaatcctttgctanttgntctttttgcaggatcccatcgattcgaattcggcacgagataagggtggggccttaattcagtagaattggtggcctcctaagcagaggaagagagatttttctttctctctctgccatgtgaagacagtgaggagtcggccgtctgcaagccaagaagagcccttatcaggaacagacttggctagcaccttcatcgtggacctccagcctccagaattgcaagaaaatacatttccgtcgttgaaaccacccagtctgtggtattttgttatggcagcccaggcagactaatacgtgaagcctgctctaaatagataaaataagaaattactacagagggctctttagaaattgtatttaaaaacaagacaatccatatttacctaagatttacagaatgtatgtctataaaaggagggatttctggactagatgatgatgaaaaatgttcatataaaggcaccttcagcttcgagttgccaacacaggaggaagaatgctccctgctgttcagatgctgatatgtgtcctgtgctttctggatggccagtgggatcataagctggtagaagccagaactttcatccactgacttcatattcttncacatnctggaactgtgggtgtttgaccttttaaaaaataaatttaagcaaattgaaatgntttcctttgaganttttggccanaaacccacatnganattttncgtctncc

SEQ ID NO: 701 - DNA, 751 bp, Homo sapiens
  misc_feature (1)...(751): n = A,T,C or G
gcttnnaattccnttccaaagnaaaccctttgnaaattnccctttctgnttggatcccatccgattcgaattcggcacgagggtaagtcaggtgattgaatcccggaantnttcattgtcttcaagctcacaatactattttgggacaaacagttgtctagtgtttggactcatgaaccctgattcttgagggtggtattttactgcttttgtgatttggtttcaacatatatagtcttttctccggagttaccttaggtcagtggccagtgtttcagcccctggaaagggcatgggctgccactgaggttggtcacaggcctctcagctcatggtgggagtgggttcaggagttggtaagtagggttcagttctgttgttgccaccgatggcaacaggggtttgtaataatccctagttgtgtcaattatgtcacttaattttcacaacaggtctctgaagtgtttctcatctcatttttacagatgaggcctgcctgtgttaatacacctagtgaggagtggagctgaatttgaatgcaagccttggcaccttaattgagcaagtttgaaacctcgcttgttgcccttctggaaggagtcangaatttncagttctgggcctgggctgtgggtctggcagacagacctctggccctaaggtttgggtnccangttctctgcttccagaatgagaagctttgctgtgcaccaagnanctgggcccctctggnatctcntgaatnaaaann

SEQ ID NO: 702 - DNA, 748 bp, Homo sapiens
  misc_feature (1)...(748): n = A,T,C or G
gntttgaancccctttnnttnaaatcctttgctacttgntctttttgcaggatcccatcgattcgaattcggcacgagcctgaatataaagaggaggaggaagaccaagacatacagggagaaatcagtcatcctgatggaaaggtggaaaaggtttataagaatgggtgccgtgttatactgtttcccaatggaactcgaaaggaagtgagtgcagatgggaagaccatcactgtcactttctttaatggtgacgtgaagcaggtcatgccagaccaaagagtgatctactactatgcagctgcccagaccactcacacgacatacccggagggactggaagtcttacatttctcaagtggacaaatagaaaaacattacccagatggaagaaaagaaatcacgtttcctgaccagactgttaaaaacttatttcctgatggacaagaagaaagcattttcccagatggtacaattgtcagagtacaacgtgatggcaacaaactcatagagtttaataatggccaaagagaactacatactgcccagttcaagagacgggaatcccagatggcactgttaaaaccgtatatgcaaacggtcatcaagaaacgaagtacagatccngtcggataagagttaanggcaaggagggtaatgtgctaatggacccgaactgtgacgatcctcatgtgatcatgaagtaccagtactgactttttatgttaaaaaatgtccatttactgng

SEQ ID NO: 703 - DNA, 769 bp, Homo sapiens
  misc_feature (1)...(769): n = A,T,C or G
ggnnntnnnagnntttgaantccctttnnttctaatnctaggcttctngttctttttgcaggatcccatcgattcgctcagctgaggcaattaaactggaaaagaaatagattgaaaagatactacagaagaagcagtacagaagttgggggactgaaggagagggagccactgcaggtgctagctgcttaaggggataccagtccttttacagatataatagatacagcttctgaggtggagggtgataggagtgtgtagagaaattgcagttcagaactggagcatgcagttaggcaagaggcatcccatgtgaagatgtcaagcaagtactggaaaatgctgaactaaaactcagggatggatatgtagatttagagaacttcattgtagaggcagtcattgaaagctaaaagggctgataataaaattgccaaggatggaaatagtaagagggagtcagtgttattaggattagaattctgttttgttttttctttaaacagattctcgctctgtcaccctggctggagtgaagtggtgtgatctcggctcactgcggcctcgacctcccaggctcaagttatcctcccaactctcagccttccaagtagctgggaccacagccattcaaacacatgcctgccttatgtttggatttttttgtanaaaccaaggttttgccatgtttnccaggctggnctnngaacttctgggcttaagccattcccccacccttgggtctcccaaaatgctngccattatangg

SEQ ID NO: 704 - DNA, 759 bp, Homo sapiens
  misc_feature (1)...(759): n = A,T,C or G
cnaannncnnggnttcnaatannaggctacttgttctttttgcaggatcccatcgattcgaattcggcacgagacccgtccggggccggccaatttgcatatttggaatgcgccgctataaacccggctggggttttgcagcgatttcttagatgtaaaaatgagatctcaatagcagcgggctgggcacatcctctcctctctccttctctctctgcccggagctggtttccgtctctcggctcggggctggaactccggcccaacctaggcgcgcagccgccacgagatggcgcacttccgatcaatgtcaaagccgccggggagccgggaaccccagcatgattcttggcctttgttcgcttctgatactaagagcagcacggtacattatttcacttgtcccgctccccttcataacagaaaaaggggactcaccctcaagaagtgattggtatggtaatttaaagcaacgcgcattcgctaggcctcgcgagcgtcgccgcgcggagaagccagctgtcccttggcagtgatttcggaaatgtgtcaaggcaattccaaaggtgaaaacgcagccaactggctcacggcaaaagagtggtcngaaaaaagcgcttgccccttacacgaagcaccagacactggagctggaagaanggagtttctgttcaatatgtacccttactcgaaaagcggngcctagagaataacccgcancgttccaccttaacggacaggacaagtggaaaaatcttg

SEQ ID NO: 705 - DNA, 777 bp, Homo sapiens
  misc_feature (1)...(777): n = A,T,C or G
tttgaaatcccntttnttnaaatcctttgctncttgttctttttgcaggatcccatcgattcgtcctgaagctcggggggctgcaggtcctgaggaccctggtgcaggagaagggcacggaggtgctcgccgtgcgcgtggtcacactgctctacgacctggtcacggagaagatgttcgccgaggaggaggctgagctgacccaggagatgtccccagagaagctgcagcagtatcgccaggtacacctcctgccaggcctgtgggaacagggctggtgcgagatcacggcccacctcctggcgctgcccgagcatgatgcccgtgagaaggtgctgcagacactgggcgtcctcctgaccacctgccgggaccgctaccgtcaggacccccagctcggcaggacactggccagcctgcaggctgagtaccaggtgctggccagcctggagctgcaggatggtgaggacgagggctacttccaggagctactgggctctgtcaacagcttgctgaaggagctgagatgaggccccacaccangactggactgggatgcccgctagtgaagcttgaagggtgccaaccgtgggttgggctttcttaagcatggaggacatttttggcaatgcttggctttgggccatttaaatgggaaaccttgaaaggccaaaaaaaaaaaaaaantnatntnaaaaanaaacttnnaccttttaaaacttttaantgnngnccgnttttacnttanattccagacttgattaggaatccattttt

SEQ ID NO: 706 - DNA, 760 bp, Homo sapiens
  misc_feature (1)...(760): n = A,T,C or G
gntttgaaatnccnttnnttcaaatnctnggctacttgttctttttgcaggatcccatcgattcgaattcggcacgagnaatgcaaagggctgcagttctcattcaggctactttcaggatgcacagaacatatattacatttcagacttggaaacatgcttcaattctaattcagcaacattatcgaacatatagagctgcaaaattgcaaagagaaaattatatcagacaatggcattctgctgtggttattcaggctgcatataaaggaatgaaagcaagacaacttttaagggaaaaacacaaagcttctattgtaatacaaggcacctacagaatgtataggcagtattgtttctaccaaaagcttcagtgggctacaaaaatcatacaagaaaaatatagagcaaataaaaagaaacagaaagtatttcaacacaatgaacttaagaaagagacttgtgttcaggcaggttttcaggacatgaacataaaaaaacagattcaggaacagcaccaggctgccattattattcagaagcattgtaaagcctttaaaataaggaagcattatctccacattagagcaacagtagtttctattcaaagaagatacagaaaactaactgcagtgcgtccccaacaagttatttgtatacagtcttattacagangctttaaagttccaaaaggatattcaaaaatatgccaccgggcttgccacacttaattcagncattctatcnaatgccccagggc

SEQ ID NO: 707 - DNA, 856 bp, Homo sapiens
  misc_feature (1)...(856): n = A,T,C or G
gttgctttgaagcctttgaaatncnttgtttnaaatncttggctttngntctntttgcaggatcccatcgattcgcctccctggatgtgcagacatggaggaggacagaaggcccagctcagtggcccccgctccccaccccccacgcccgaacagcaggggcagagcagtctggaggtggtgntcccacttgatgaagagcaggcgactggnttggagagggagatcatgctggctgnaaagaanggactggacccatacaatgtactggccncaaagggancttcaggcaccagngaagacccaaanttantnccctacatntccaacaagagaatagnaagctgcatntgtgaanaggacaataccagcntcnantggttttggctnnacaaangccangnccancnatgcccccnntttgnaacccattacaanctgntgccccantagctggcacactgancncctnntctaaattacttaaaatnatgctgtanaagtatantntttncagaanagactaancantncatngnctacttctccaaaaaaaantganaaaaatnataaaantcaaantaaatactaaatnannanataanancantannaanttatatttcnnanatantanannnancnntttanaannanttanggnnancannnattantnntnnatannttacattaaanttattnanannanaaannnannananannatatattannananantnacntaaactnnnntnaatnntccananacttnaanaanaataagnnntanatnannnnttangnntnatatannttnanatannnnnnacnatannacatnnnntannga

SEQ ID NO: 708 - DNA, 766 bp, Homo sapiens
  misc_feature (1)...(766): n = A,T,C or G
ctaatactggctacttgttctttcnaagcnctggnntttnannnatnnagctacttgttctttttgcaggacccatcgattcgcccaaacttatcgggggtgccagaggcagagtagacaagccttagtggccgccatttgttgaatatctactgtgcgccaagcagtgcgtcacaactttatgaagtaggtattattatcatccccattttacaggtgaagaaactgagtctctgagagaccaacttttccaaggtcacacagaggtgggatccagcccacttccgtctgaccccaagcccctgctgttaacccctgccccattgtggggaggttccggcccactctggagttctctggtctgcgtcagtcctcaggagaagaaagaatgggggtgatgctccaaatattgaggctcccatctgtctgtcctgcactaggcagagccaggcttctccatggggcacaggagagagggcaccagatctgaggagcaaataggttcttggtctgagatctcatgggatcaggttgccagccctgcaaacccccgctcangtctagaggacatggagctgcctttcaaggtgcatttgcttcctttacagactcggactctgtnctctggctactttgggccgtcccggactcgggaatgcgtnctacacttgtaggggcaaaaccccggtttgactctttccgggttcctacccttaaccaagcctttactttctngggatcaccctgttgggactttttgtccacc

SEQ ID NO: 709 - DNA, 743 bp, Homo sapiens
  misc_feature (1)...(743): n = A,T,C or G
gaannccnttnnnttgcaaatnntnggctacttgttctttttgcaggatcccatcgattcgaattcggcacgaggttttttttttttttttttggagaatgaatgcaagatttattgagtggtggaagtagctctcagcagatggctggggagccagaagggggatagcatgggaaggtagtcttcctctggagtctggctgctcagcagccgggatctcctactgtccttggccgaatttcccttggcgtccgaatcgttccaccatcaatggcctgccagcgtctttcgatgtgttcttctgccagtgtgttcctcttgacgtccagccgcttgtgtgtgtgcccgctggggtctcagggtttttataggcacagaatgggtggcatggcaggccagagtggtcttggaaaatgcaacatttgggcaagaagacaggagtccttgttctcattaggtccatgggcacaagcctgagggtggagcccttgccagtgaccctgcccttctctacccagcacttccctgtccccctcccatatcaccgttgccatcttgtccttgatgaggaatacaactcccaattcagtgnttgcttgtgggaagatgcaatcctctttatgacaagtttctaanaagttgataagaaaaatggggacctgcctaagggctagtatctcatttaatactctatagaatattatgnggttttcccttttangttttaaatgttgaanancnan

SEQ ID NO: 710 - DNA, 753 bp, Homo sapiens
  misc_feature (1)...(753): n = A,T,C or G
gnnnnnnnnnnagngtttgaantcctccttngaaatcctttggcnactcgctctttntgcaggatcccatcgattcgaattcggcacgaggggcaatgcagttataatactgtgttaatttcagacatcttctggtcctccgagccttgtatttacatactagctgaaactgcaagtggaaatgaatggagctgatgatatttgccttatcctaatttttctgtgaggaggagaaaaacacttgtgcttcaaataagcagatgtgaaaacacttctcactaatcaaaatgtttaccactaggttatgagagtctgcctctcataggcagtgaatctgatatgtatacttagtaatataagtctatttagtttgacaaaaccttagagcagaatttttgcagcttagttcaggatgatcactagcaatgccaaacttcattttttattgaacttggatccaagaaggcctgctgtgtctatttcagtatagactctcataccaatatatttatgctccaagtcactacacccagaagtgatgcagtgggggaaatgcaaagacaacatcactgtaagattcacagaatggatcttttgtaaaatattttatattgacttaaggaaaacctttcattgggaattaattaaattaagtctctaatatcctggaagacagtaaaaantnaagcnggtgntctcaantttgaacccggcnattngnaatttcattataggaatttctgaaaataatcc

SEQ ID NO: 711 - DNA, 718 bp, Homo sapiens
  misc_feature (1)...(718): n = A,T,C or G
naatngctaggctacttgttctttttgcaggatcccatcgattcgaattcggcacgagcctacttattggatgttggctctttggtgtcatggagatggctttactgtaggtttgttgtgttgcattacttttcattgggattgaactgagaaataacaaacaagctttaagtgggaaattaaaaaaaagaagtaacctatgtagatccaaacttaaaatgtgagaaattattgaaatttcattttctacaaacttgaaattagcctgctaattgtaaagttgttttaataatgctgacaaatgtcagttacgtttgcaaaggagtgtatggttctaggtatttgcctactgttaaccgttgagaaaaacattgtcaggttagcaagtctattgaaatagagacctccttagtttacagcaaagaataaatagctgatgactggagattgggactaaggttttatttatttatattctttgaaagaaatcggacagttaataagtggtttgtggtagagttgaaggatgtctgagagatggaaagagagtgacaaaggaggagaaggaatagtatttcttttttagtattgntttgaaattaaaactctgntattttaatatggtaaagagcaagaatttgggttgggccgcngtgactcacgcctataatcccagcactttgggaagccntggtgggcaaatcacctgaaattangg

SEQ ID NO: 712 - DNA, 783 bp, Homo sapiens
  misc_feature (1)...(783): n = A,T,C or G
agttgaantncttgctacnnaaaacctttggcnactngctctttntgnaggatcccatcgattcgcaaagatggtcgtattactaaaggtgaataaccagcgcggnnngcacgtggagtcactggaacatttgtgcaatgctggtgggaatgtcaacccgtgcggccctctggaataagcctggcagctcctccaagagttaccgngtgacccancaattccactcctagctccacccacaggaattgaaagcaaanacgcaaacagatgcctgtncaccaaagttcacggcagcatncttcgncatagtggcagcatccgtcgtcacagcggcatcatccttcatcatagcggcagcatccgtcgtcacaagcggcagcatccttcgccacagnggcangcatctgtcgtcacancggnagcatccttcgacaaagcggcagcatncttcgtnatagcngcagcatcctttgccatanccggcaaggtggaaaccctgtccatccactgaggcgtgcatagactaaacatgggcagtccagcactggaattccaagccgtacaacggngnccacngtcaaaaangaatgaggaccctgangcacctgngcnganaacaagaacnngcgannccaanacttttnagacattattgccttaagtngaaaaacccagngcaccaacgggaaaccngaccgncntgnanccctgnttaacnttnantnngttncccgaaaatgggggcacnttnccaaaaaggggaataaaaggggagaattncct

SEQ ID NO: 713 - DNA, 765 bp, Homo sapiens
  misc_feature (1)...(765): n = A,T,C or G
gttgaantccttcctttcaaatngcttggctactcgntctntntgcaggatcccatcgattcgaattcggcacgagcccacatgtaccaggttgagtttgaagatggatcccagatagcaatgaagagagaggacatctacactttagatgaagagttacccaagagagtgaaagctcgattttccacagcctctgacatgcgatttgaagacacgttttatggagcagacattatccaaggggagagaaagagacaaagagtgctgagctccaggtttaagaatgaatatgtggccgaccctgtataccgcacttttttgaagagctctttccagaagaagtgccagaagagacagtagtctgcatacatcgctgcaggccacagagcagcttgggttggaagagagaagatgaagggacatccttggggctgtgccgtgagttttgctggcatangtgacagggtgtgtctctgacagtggtaaatcgggtttccagagtttggtcaccaaaaatacaaaatacacccaatgaattggacgcagcaatctgaaatcatctctagtcttgctttccttgtgagcagttgtctttctatgatccccaaagaagtttttctaaagtnaaaaggaaaattcctagtggaattcancccccaagggaaaaaagcccacttgnccacannaggaagccnggntnccccttngttccggcttaanggccccttgttcaggaaaccacactgggggancttnttttttttn

SEQ ID NO: 714 - DNA, 740 bp, Homo sapiens
  misc_feature (1)...(740): n = A,T,C or G
gtttgaannccttngntttcnaatgctnggctacttgttctttntgcaggatcccatcgattcgccaaaagcttgtggcaaatttgaaatttctgccattagggaccttacaactggctatgatgatagccaacctgataaaaaagctgttcttcccactagtaaaagcagccaaatgatcaccttcacctttgctaatggaggcgtggccaccatgcgcaccagtgggacagagcccaaaatcaagtactatgcagagctgtgtgccccacctgggaacagtgatcctgagcagctgaagaaggaactgaatgaactggtcagtgctattgaagaacattttttccagccacagaagtacaatctgcagccaaaagcagactaaaatagtccagccttgggtatacttgcatttacctacaattaagctgggtttaacttgttaagcaatatttttaagggccaaatgattcaaaacatcacaggtatttatgtgttttacaaagacctacattcctcattgtttcatgtttgacctttaaggtgaaaaaagaaaatggccaaacccaacaaactaacattcctactaaaaagttgagcttggacatattttgaatttttgtaagtgaaagatttttaaactgactaacttaaaaaaatagattgtaattgatgtgccttaatttgcataaatcataaatgtatgtcctctctgtaattggtttaatgtgtgcttgaan

SEQ ID NO: 715 - DNA, 708 bp, Homo sapiens
  misc_feature (1)...(708): n = A,T,C or G
tttgcaaatngcttggctacttgttctttttgcaggatcccatcgattcgaattcggcacgagggaggctagactcaagctgtctggagagtgtgaaacaaaagtgtgtgaagagttgtaactgtgtgactgagcttgatggccaagttgaaaatcttcatttggatctgtgctgccttgctggtaaccaggaagaccttagtaaggactctctaggtcctaccaaatcaagcaaaattgaaggagctggtaccagtatctcagagcctccgtctcctatcagtccgtatgcttcagaaagctgtggaacgctacctcttcctttgagaccttgtggagaagggtctgaaatggtaggcaaagagaatagttccccagagaataaaaactggttgttggccatggcagccaaacggaaggctgagaatccatctccacgaagtccgtcatcccagacacccaattccaggagacagagcggaaagacattgccaagcccggtcaccatcacgcccagctccatgaggaaaatctgcacatacttccatagaaagtcccaggaggacttctgtggtcctgacactcaacagaattatagattctaatctgatgagttactgagctttggtcccttaaaacaagctgacttggtccctaaaccagatgaaaatccagatgctctatacttggctttaagaactgctttcn

SEQ ID NO: 716 - DNA, 730 bp, Homo sapiens
  misc_feature (1)...(730): n = A,T,C or G
ttgcaaatngctnggctacttgttctttttgcaggatcccatcgattcgctcccatggaggtggtgggaatggcaccgagaagtttgatgacagttatctaatggactagaggttggcaaactttctgtaaatggccaggtagtaaatagttctgcttttgaaggcatatggtctcttgcacctactcgaggctgaaagcagctatagacaatacataaatgaatgagcgtgagtgtgttccaataagaaaaaaacatggctgtttgcttcggccccagggttgtagcttaccagtcctgtaacagatcacagtttgctcttttggtcacaaatacttgaacccctccctagttcagagcatttgataccgtaatatttaaagctcacttgtaaaacatcgtttgttgcctccatccatagtatctcaaacagaatgtctctcccaaatatacctaaattccatattctctgaagcacaaccagctattttcttgacatacttcctaacacaccccacagttcacaatttgatctgaaaacttgttaagggaggttctttggcatgtgatgccataaaaagagaggtatgggctctcctttaaaaaagagaccctttttatgagactcacaataggataaaagagcccatgcctatttttaaacatttttttcactatataagacatgcatgcctgnaaaatggtttttaattagtatnantgcttaatn

SEQ ID NO: 717 - DNA, 728 bp, Homo sapiens
  misc_feature (1)...(728): n = A,T,C or G
naatngctnggctcttgttctttttgcaggatccctcgattcgctgcagtgagattctctgcaatgactggcctcagcaagggggcagcttaggaccctgacatcccaggtcactaagccacataggataagtaatgggtggacagaagcgggaaaggagaagggcagggcacatgtttaaaacttgaactttctgaggctaagactggaaaaggaatggtttcagctgatatatttggataccagttgactatttttaggaaaaaaacacaaatggcttttaaacatcacagtgtgatacagtctaactcagaattagagacaggcaaaacagaactccatcttaaaaaataaataaataaaataaaataaatgacatcactttggttcagagctctaaaatggagggaggaagccattctaaaaaggactccctacatgacctgcaacttgaaaaaaaattaaaagctccaaaaaaaacaatncaggagcttaccttgaaccttttgaattgggccaaattgccgatgaccactgcatcctggaaaattttatttcaccagcactacaacttctcaacagcaccaaccaatttaactatggatttttgtactaancccagttgcctctttnaaaacaacttgtcaactttgtctaatcaccctcagcttttttttaaaaacccctnctctacccctntctcttcagaacaccaaagtggncttttn

SEQ ID NO: 718 - DNA, 730 bp, Homo sapiens
  misc_feature (1)...(730): n = A,T,C or G
gaantccttnnntttnaaatcnttggctacttgttctttttgcaggatcccatcgattcgaattcggcacgatctagatattgcccaatcgctgcccacagtgcacatacctttccaccagtcacatgtgagagggcagattttccaaatgctcatcaccacttggcactgtgtggactataattttggccagttaggaaatggcatctcattgttttcatcttaatttgcgtcagcctgattactcattgaaacttgtgaggttgagaaacttttcttaagcttattggccattcaagtttcctcctttatgaaatggttgttcatgtcatttgctcatttttatattagattgtttttcttttttccagctgacttgtaggaactctacatcttatcaatattaatcatttatcgaaaactatttgggtgccattatcttctcctagtcaatgttttttgtttgtgatatcttttataatatataagtttttaatgttggcagaagtaaagttaatctttttggctgtgttgtgtgtcttgtttgatgtaaagatagtttctgtaatagttttgcagtttgattggtcatctttaggtcttcaattacaacctgcacattcatccctctatcctctttcttactctggttttctccatagcacttatcatccaataatatggcatgcacttatttaatctggtttgcatatatattttngctggtacg

SEQ ID NO: 719 - DNA, 733 bp, Homo sapiens
  misc_feature (1)...(733): n = A,T,C or G
ttcaaatcgcttggctacttgttctttntgcaggatccctcgattcgcttcagtgcacacaacaggagagaggagaaagaagaaacgctagtaattccaagcactggaattaagttgccttcatcagtgtttgcttcagagtttgaggaagatgttggattgttaaataaagcagctccagtttcaggacctcgactggattttgatcctgacattgttgcagctcttgatgatgattttgactttgatgatccagataattctgcttgaggatgactttattcttcaggccaataaggcaacaggagaggaagagggaatggatatacagaaatctgagaatgaagatgacagcgagtgggaagatgtggatgatgagaagggagatagcaatgatgactatgactctgcaggcctattgtcagatgaagactgtatgtctgtgcccggaaaaactcacagagctatagcagatcacttgttctggagtgaggaaacaaagagtcgcttcacggagtattcgatgacttnctcagtcatgaggagaaatgaacagcttgaccctacatgatgagangtttgagaaagttttatgagccatattgatgatgatgaaattgggagctctggataatgccagaatttggaaaggttctattcaagtgggacagcaattcgctttcnaggaagttttgaatgactactattaaagagaangcccaanaattntntt

SEQ ID NO: 720 - DNA, 740 bp, Homo sapiens
  misc_feature (1)...(740): n = A,T,C or G
agttnnnttnntnctnttcaaatccttggctacttgntctttttgcaggatcccatcgattcgaattcggcacgagaagagaaggacctagagattgagaggcttaagacgaagcaaaaagaactggaggccaagatgttggcccagaaggctgaggaaaaggagaaccattgtcccacaatgctccggcccctttcacatcgcacagtcacaggggcaaagcccctgaaaaaggctgtggtgatgcccctacagctaattcaggagcaggcagcatccccaaatgccgagatccacatcctgaagaataaaggccggaagagaaagctggagtccctggatgccctagagcctgaggagaaggctgaggactgctgggagctacagatcagcccggagctactggctcatgggcgccaaaaaatactggatctgctgaacgaaggctcagcccgagatctccgcagtcttcaacgcattggcccgaagaaggcccagctaatcgtgggctggcgggagcttcacggncccttcaccaggtggaggacctggaacgcntggagggcataacngggaaacagatggagtcctttctgaaggcaaacattctgggtctcggcggccgccancgctntggcgccttctgaccgtcgctnctacttncgncttttcaaatttttggnataacccccgtgtttgngtaaaatccagtttttgttccgntaaaaaaaaaaaaaaat

SEQ ID NO: 721 - DNA, 736 bp, Homo sapiens
  misc_feature (1)...(736): n = A,T,C or G
nnttnnnttttnnaaatcccttggctacttgttctttttgcagggatcccatcgattcgcatgagtgatattttggtctgggtttcctcttaagattttagtttgtctgaattaaggaaaaatgtttttaatatacattcttattttgtcccacccctccagaaataagctggaaatcttaactttttggggggtcttttttggtgttttaatgggcccagaactgtggtttaaatttttatgtatgtattttcttttttgtggagtataaatttaaaaactggatttgggacctaaaatactcctcaggttgatgtattcatgaagttttaaaacatctttagttttcaaagtaaactggatatgtggaccttaaagttattgagtttaagctacaaattgtaacgtcattactggacatgtcagcatcaaccctctcaaaatagcttggtcactttatgaaggggcgttttaaagttgttgtttagcagtgacatttaatatggtccaattgcttttctttttaacgtgacaaaaagagaataaggaacaaacactattgctgccgaatgccataacactgagttgtcaaattgtgattgaggaaatgaaaaggtttatactttttaaaaaaaaaaaacnnaanccaaaaaaccaaaacttcaaatggaataaattattcatgaagcccttaaaaaaaaaaaaaaaaaaactcgaacctntaaaactntngngg

SEQ ID NO: 722 - DNA, 751 bp, Homo sapiens
  misc_feature (1)...(751): n = A,T,C or G
attnccttggcttttcaaatccttggctactngttctttntgcaggatcccatcgattcgaattcggcacgagattatagagattaatctcctttgctcgaagtctatttaaatattagtcacatctaaaacatacttttacagcaacatctagactggtgtttgaccaaacaactgggcatcatagctgacacataaaattaaccatcacaaccatgttctaggcactgttcctcactgcctgagaagacaccgttatgtttattagggtttttgagttttatccacagcttttggttatctgcaaccatgtctcccaccattaacatagttcacactgagatgaggattccctatttaacacttggtcccaacttcttcacagtccatctggttttgtagagggaacataactggacattctggtcaggttaggtgaggtcaggccttcaggacgctattttcactgagttgctttataaggcacattatgcaaaattccatcagctcttctgttcactacattcactgttgaaattctaagagtgagactgctgtctcacaccaaagccagtgggtactatcttcagtaggcacgcagcatcatgtttgtatttgatccanctagatgacatgtaagagaaaactttattgnggactctgtaaagtgtgacattcgtttgtgactcaatttgctcatgtatttggtcctggggagtcattacatagctaactttcagctgctttcaat

SEQ ID NO: 723 - DNA, 749 bp, Homo sapiens
  misc_feature (1)...(749): n = A,T,C or G
tttaatncctttcnntaatccttngtttcnngcnctttntgcaggatcccatcgattcgatgctagccaaagcctgctgccagctccatagcctggacctacagcactccatggtggagtccacagctgtggtgagcttcttggaggaggcagggtcccgaatgcgcaagttgtggctgacctacagctcccagacgacagccatcctgggcgcactgctgggcagctgctgcccccagctccaggtcctggaggtgagcaccggcatcaaccgtaatagcattccccttcagctgcctgtcgaggctctgcanaaaggctgccctcagctccagcctggaccttgcccccaggtgctgcggctgttgaacctgatgtggctgcccaagcctccgggacgaggggtggctcccggaccaggcttcctagcctagaggagctctgcctgncgagctcaacctgcaactttgtgagcaacgaggtcctnggccgnctactccacggctctcccaacctgcgcttactggatcttcgtggctgtgcncgcatcacgccggctggccttcaggatctgccatgtcgggagctggagcagcttcatctgggcctgtatggcacgtcagaccggctgacttttaccaangagggcaagncccttttgaccagaantggtgcatacactgcgaagaactggactttgaatggccaagggttcaattgagaaagacctggaacangcccttgctnct

SEQ ID NO: 724 - DNA, 761 bp, Homo sapiens
  misc_feature (1)...(761): n = A,T,C or G
ttnnnnccctttttaatnccttctactaatccttggctctcgntctttctgcaggatcccatcgattcgaattcggcacgagcctcagccttctaaaaagctggggctacacccagctgaagaaattgtaactaaagatagattgtttaaagcaaagcaagaaacttctgaagaaatggaacaaagtggagaagcctcaggaaagcccaacagagagtgtgcaccccagattccttgtagtactcctattgctactgaaaggacagttgcacatttgaacactctgaaggaccgtcacccaggtgatttgtgggcccgcatgcacatctcatccctggaatatgctgcangagacattacccgaaaagggagaaaaaaagacaaagctcgagtgagtgaactgctccaaggcctctcattctctggtgactcagatgtggaaaaagataatgagcctgagatccagcctgctcaaaagaagttaaaggtatcatgtttcccagaaaagagttggaccaaaagagacattaaacccaattttccaagctggtcagcactggattctggacttttgaatctcaagagcgaaaagtttgaacccagtagagctttttgaattattttttgatgatgaaacattcaacttaattgtcaatgaaaccnataattatgcttctcagaaaaatgtcagctttggaagtccagttcaggaaaaaaaannnnnannaaaaaactcgagcctntanaactatngtgagtcc

SEQ ID NO: 725 - DNA, 760 bp, Homo sapiens
  misc_feature (1)...(760): n = A,T,C or G
tttcnccccntttttanccccttnctctaatccttggntctngttctttttgcaggatcccatcgattcgaattcggcacgaggcggactctcaggacgaaaagagtcaaacctttttgggaanttcagaggaagtaactggaaagcaagaagatcatggtataaaggagaaaggggtcccagtcagcgggcaggaggcgaaagagccagagagttgggatgggggcaggctgggggcagtgggaagagcgaggagcagggaagaggagaatgagcatcatgggccttcaatgcccgctctgatagcccctgaggactctcctcactgtgacctgtttccaggtgcctcatatctcgtgactcagattcccgggactcagacagagtccagggctgaggaactgtcccccgcagctctgtctcccttgctagagcccatcagatgctctcaccagcccatttctctactgggctcctttttgactgaggagtcacctgacaaggaaaaacttctatcagtactttgatatgtcacagtttcatgtttatccagttcaatgtatttttaaatttttccttgagacttctttgactgatagattattgtgaagtgtgtttttaaatttncaaatgtttanggattttcatatctttcttatgctgatttccaattggattccttacaatgatttttgggtttcatctgctcttggatgattactatctcttttaaatttggtgtggccaagttttagggccn

SEQ ID NO: 726 - DNA, 741 bp, Homo sapiens
  misc_feature (1)...(741): n = A,T,C or G
ttntgccctttgtntnatccttgntcttgcctttttgcaggatcccatcgattcgaattcggcacgagacaagttctattgagtgctattcagaataggaacaaggttctaatagaaaaagatggcaatttgaagtagctataaaattagactaatctacattgcttttctcctgcagagtctaataccttttatgctttgataattagcagtttgtctacttggtcactaggaatgaaactacatggtaataggcttaacaggtgtaatagcccacttactcctgaatctttaagcatttgtgcatttgaaaaatgcttttcgcgatcttcctgctgggattacaggcatgagccactgtgcctgacctcccatatgtaaaagtgtctaaaggttttttttggttataaaaggaaaatttttgcttaagtttgaaggataggtaaaattaaaggacatgctttctgtttgtgtgatggtttttaaaatttttttttaagatggagttcttgttgcccaggctagaatgcaatggcaaaatctcactgcaatctcctcctcatgggttcaagcaattctcctacttcagcctcccaagtagctgggattacaggcatgtgctaatttggtgtttttaatagagatgagggttttccatgttggtcangctggtctcaaactcctgccttangtgatcgcctcggcctnctaaagtgctggaattcaggcatgaancnccat

SEQ ID NO: 727 - DNA, 751 bp, Homo sapiens
  misc_feature (1)...(751): n = A,T,C or G
ccttcttccnaangctntgttgaacncctttcnnnatcgcgcttgcgctttgagctaggataaaaattgggtaaagggacatttgcttacctgnntnatgaatcactntttgaaatgtgatcttgccatatcatcaagaaacttgttttctggatgaatactgggagaataaaatgagaactctggagtgagctaaattgatcccaatnaagtttttctgcttagcagacagaaggtataattntttgacaccctttcccacctggtgcctatgctaggcttgtcctganaacatncctcagtaacttgatattcacatgacctacaggatgtcccatctgcagggctgagtcagttggggaacaccagaggctacacagtagctattcctgctactcggttaatgagcttggcaggttctttgtctcactgaattcttatcatggaaacagcagcagcagccgctaggaaatcttcaagtgtagnggcctgtgctaacccagtggtaaatcccttagatcccctgctggtctctggcaaaactccttgatnttgggtaccatgtatantttgcctttgacntttaacgctttctacgatanggtaancacncntttaatttangcnctggancattaactttctttgcaaaggctacttatngccngncacaantgcagcctcggacanancnnangnnatatcctgttggccatggctntgatgtttgacanccgatangccttctncg

SEQ ID NO: 728 - DNA, 765 bp, Homo sapiens
  misc_feature (1)...(765): n = A,T,C or G
tngnntttntttaacnttgtttgacgcctttctgcaggatccctcgattcgcactggctacctgcagattgcagagcggcgagagcccataggcagcatgtcatccatggaagtgaacgtggacatgctggagcagatggacctgatggacatatcggaccangaggccctggacgtcttcctgaactctggaggagaagagaacactgtgctgtcccccgccttagggcctgaatccagtacctgtcacaatganattaccctccaggttccaaatncctcagaattaagagccaanccnccttcttnttcctncacctgcaccgactnggncacccngnacatcanngagggtggggagtnccncnntgttcagtccgatgaggaggaanttcangtggacactgncctgnccacatnacacactnacagagangccactcnngatggtgntnangacagcaactnttaaattgggacatgggcgtngtntggccacactggaatccanntttggctgtatgcggaatttcacctgcnaagccaggttnnttnatagacgttcttgattattacataattgccaatcatgtggtgagnaacttgtgngaacantttaacaattaantgtgaagaccgtacaangaattagttaaangcnatnnagggctaaacaagctattacttntgannnaanttaangnatntaanntttnctgnttctnaaaatnttcaatntnnngggaacanttgtaantttnncnt

SEQ ID NO: 729 - DNA, 743 bp, Homo sapiens
  misc_feature (1)...(743): n = A,T,C or G
tannnnttnctntannntttctgangcccttntgcaggatcccatcgattcgaattcggcacgaggagatctctgggatgtcagtgaggctggttgaagaccagaggtaaactgcagaggtcaccacccccaccatgtcccaggtgatgtccagcccactgctggcaggaggccatgctgtcagcttggcgccttgtgatgagcccaggaggaccctgcacccagcacccagccccagcctgccaccccagtgttcttactacaccacggaaggctggggagcccaggccctgatggcccccgtgccctgcatggggccccctggccgactccagcaagccccacaggtggaggccaaagccacctgcttcctgccgtcccctggtgagaaggccttggggaccccagaggaccttgactcctacattgacttctcactggagagcctcaatcagatgatcctggaactggaccccaccttccaactgcttcccccanggactgggggctcccangctganctggcccagagcaccatgtcaatgagaaagaaggaggaatctgaaccttgggtaaggatttggggcacagtaccaggaagggggcttggtgccagaccttatgaggaagaaggattttcctatgtacagagaangggaccctgtnctgttgggaagtgcttgtgcaaacctaaccaagttactaacccctctgntttctgtgctacacaaaggggataaatt

SEQ ID NO: 730 - DNA, 744 bp, Homo sapiens
  misc_feature (1)...(744): n = A,T,C or G
tttnttccttcctctaatccttttancgcctttctgcaggatcccatcgattcgaattcggcacgaggggtcctccaagagtttggggcgcggacnnnagtaccttgcgtgcagttatgtcggcgtntgtagtgtntgtcatttcgcggttcttacaacagtacttgagctccactccgcagcgtctgaagttgctggacgcgtacctgctgtatatactgctgaccggggcgctgcagcacggttactgtctcctcgtggggaccttccccttcaactnttttctctngggcttnatctcttgtgtggntgagtttnatcctagcggtttgcctgataatacngatcaacccacngaacaaagcngatttccaaggcntctgcccagagcnagcctttgntgannttctctttgccagcaccatcctgcaccttgttgtnatnancntaggtgnctgaatcattctcanttncntaattgangagtanganactaaaagaatgttgactctttgaatctgctggataagagactngagatggcagcttattggacacatggattttcttcngatntgcacttactgctagctntgctanctatgcaggagaaaagcccatagttactgcgtgtnacaacaactntctaacnaacattcattaatccannnganncctttcaangaatggtaancctatgccnttcaanatactgaacttnntgccacttntggcaaaaaaaat

SEQ ID NO: 731 - DNA, 746 bp, Homo sapiens
  misc_feature (1)...(746): n = A,T,C or G
cttattccctttgnaactnactctttntcatccctttgtgcaggatcccatcgattcgaattcggcacgagtgtccttatctgaaattcagcgatcttnttgaataagcatttctctgattgtggtatatgcctttaattttatttctagagtgacaaatttttggttttgacagtttttttctagctttatagtttcttcttggggagagaatatgtcaacctcactccatcatgctgaagtaaatcttcatctcttaattttatctctcaaaaatatcctaaggattccctctggagcctgataagtaattgcagtatctggtttctatggttggatgattcaggattccaggaataatagttactttttagacctctaaagaagaagtaacaaccacgtaaatgaaaagatgcttcttaaatcatggagaatcagggcttagtatcactgtattttcaaactgtttcagccttactttataactgatttagtatatttttcttttaatttcagacttcagtgaagttccttatgacttcccctgaaattgcttccttatcatgggggcaaatgaaagtaaaaggctctaatacaacctataaggactgcaaagtatggccagggggtagtcngacttgggattggagagaaacaggaactgagcattctcctggtgtgcacctgcagatgtgaaggaagttgttgagaanggtgtccagactcttgtgattggncnanggata

SEQ ID NO: 732 - DNA, 756 bp, Homo sapiens
  misc_feature (1)...(756): n = A,T,C or G
ttnnnnncnnnnatcctttngatttnattcctntntcangtcctttgtgcaggatcccatcgattcgaattcggcacgaggtggcccataagttttaccttttaaacatccggctgcctgtgaatgagaagaagaaaatcaatgtgggaattggggagataaaggatatccggttggtggggatccaccaaaatggaggcttcaccaaggtgtggtttgccatgaagaccttccttacgcccagcatcttcatcattatggtgtggtattggaggaggatcaccatgatgtcccgacccccagtgcttctggaaaaagtcatctttgcccttgggatttccatgacctttatcaatatcccagtggaatggttttccatcgggtttgactggacctggatgctgctgtttggtgacatccgacagggcatcttctatgcgatgcttctgtccttctggatcatcttctgtggcgagcacatgatggatcancacgagcggaaccacatcgcanggtattggaagcaagtcggacccattgccgntggctccttctgcctcttcatatttgacatgtgtgagaaaggggtacaactnacgaatcccttctacagtatctggactacagacattggaacanagctggccatggncttcatcatcgtggctggaatctgcctctgcctctacttcctgtttctatgcttnatggnatttcaagtgtttcngacatcantgggaagcaatccacctgccn

SEQ ID NO: 733 - DNA, 742 bp, Homo sapiens
  misc_feature (1)...(742): n = A,T,C or G
cntatcctttnntttattccttnataagnccttnngcaggatccatcgattcgaattcggcacgagctcacacctgctttggatgcttcaagcacctcagccctctgaactacaaaacagaagagcctgcaagtgacaaaggaagtgaggcagaggcccacatgcccccaccgttcacaccctacgtgcctcggattctgaacggcttggcctcggagaggacagcactgtctccgcagcagcagcagcagcagacctatggtgccatccacaacatcagcgggactatccctggacagtgcttggcgcagagcgccacgggcagtgtggctgctgccccccaggaggcctgaggctgggtctcactgctctgaaaagacacaaccagaatggcctggggctcaggcccttggctgagtgggaatgcgttgggactgcccagctgagctatcaggtgcccatcttttctggtcccagcagtggtgaggagagcacaggcaggcctcgcccctcccttgctcacccagtttcccctncggcacaagcttccagctctgcagctggggtgacatccccagtggtttgtcgccaagacatgtggtggacttttcgccccccaaactgatgagtnccggagaatatatggagagagagatgtaaaaaaaaaaaannnnnnnnntnntnnnnnnnnnnnnnnnnnnnnnnnnnnnnnnnnnnnnnnnnnnnnnnaannnnananctc

SEQ ID NO: 734 - DNA, 749 bp, Homo sapiens
  misc_feature (1)...(749): n = A,T,C or G
nntanaatccntttnnctntaatccctctancaaatcccttgggcaggatcccatcgattcgaaaatttatagtaatgacaaatgacttatcagtgttcatcatctgaaagctaagtggttcgttcaatcactttttcaaagttgatagtagattgcatggtttcatgtttcctcatattggtttattaattctatttaatcaaggaaaataacttcagattccataaagtttcagtttatttttagtttactactaggtgagatagcacattacatacttttactatcaaatattattttagcagcttcccatagtaccaaatgatttgattccctactctcattttttaaagcatataaatatttatgggcttaaaaagggggtttttaaaaactgaggatatcagtaataaattgcagaatattttgcaaagctttcttttggaaagcaaacttttgtgcctgcctatatgcaaagtattttatcagggacttgaacaaagacctcactctttttcacttgtcttatgtcgagagaaaagggtattggcagccacattcctaagactggggaatggtgtgtccctttaaatttgaagataactttangtaattatnggaactcctcaaagaggagaaagtaattttttncagacattttctcaatctgggnctttcacacactantttncatagtcgagaatctggttttacccattgggctgngaatgtccaatatcagtcctgg

SEQ ID NO: 735 - DNA, 770 bp, Homo sapiens
  misc_feature (1)...(770): n = A,T,C or G
gngntnngnngttnnnttnttttnaatntaatccttgtntnaantccttttgcaggatcccatcgattcgaattcggcacgagggtgcccatcaccacacccagctaacttttgtatttttagtagagacggggtttcaccatgttggccaggctggtcttgaactcctgacctcgtgatccgcccgccttggccccgcaaagtgctgggattacaagcatgagcccagcgcctggctgtatctttcattttacccaagtcactttacccaagtaagtaattaggggaaagcctgagtcttgtaccacctgttcatttggggaactgtgggaaacggagccaacggacctaagtgccctttgacagtgagtttcataccatttcagtagtgtatttctttcttaatctgaataaaccagaatgatactctcagcacagaagaataaagggagcgagtcattaacgttntctttttaaacctttatgatgacttncttatgaattactgaacgaacactggaatgggactcacgtatcctgaggacatctctcaactctggccttantttcccctctgtaaaattagggtgccaactaaatgatctacaaggtccctttncaagcgcccgncattctgtaattacatcatgtggaactgnattaaacatacaccagtgaactggcangcattgggaatgtaactttcccagtaaaatgctttnggtttggttcaaaatacactntgaacttcttttcaaagacnggttnng

SEQ ID NO: 736 - DNA, 746 bp, Homo sapiens
  misc_feature (1)...(746): n = A,T,C or G
tttnncttttattcaaatncttgcnggatcccttgattcgaattcggcacgagggatgnccatcgatgctnatcnggcacgaggtgatgncagcttgcaaactggtctacatnncaaactgatagtacattgccatctncaggaagacttgacggctttgggattttgtttaaacttttataataaggatcctaagactgttgcctttaaatagcaaancagcctacctggaggctaagtctgggcagtgggctggcccctggtgtgagcattagaccanccacagtgcctgattggtatagccttatgtgctttcctacaaaatggaattggaggccgggcgcagtggctcacgcctgtaatcccagcactttgggaggccaaggtgggtggatcacctgaggtcagganctcgagaccagcctggccaacatggtgaaaccccatctctactaaaaatacaaaaattagccangtgtgatggtgcatgcctgtaatcccagctcctcagtaggctgagacaggagcatcacttgaacgtgggangcagangttgcagtgagcccgagattgcaccaccgtactnnaacctgggtgacagagcgagacttatcttatanataaatagatngatcttcacctgggtgacanaacgagacttatagatagatagatagatagatggatagatngatngatngatagatagattgataaacggaattgggccttttgctttaatgaaa

SEQ ID NO: 737 - DNA, 751 bp, Homo sapiens
  misc_feature (1)...(751): n = A,T,C or G
ntnnnnctttttgatcantcctttnttggatcccnttgctacttgttctttttgcaggatcccatcgattcgaattcggcacgaggctgacctacagcagaagctgctggatgcagaaagtgaagacagaccaaaacaacgctgggagaatattgccaccattctggaagccaagtgtgccctgaaatatttgattggagagctggtctcctccaaaatacaggtcagcaaacttgaaagcagcctgaaacagagcaagaccagctgtgctgacatgcagaagatgctgtttgaggaacgaaatcattttgccgagatagagacagagttacaagctgagctggtcagaatggagcaacagcaccaagagaaggtgctgtaccttctcagccagctgcagcaaagccaaatggcagagaagcagttagaggaatcagtcagtgaaaaggaacagcagctgctgagcacactgaagtgtcaggatgaagaacttgagaaaatgcgagaagtgtgtgagcaaaatcagcagcttctccgagagaatgaaatcatcaagcagaaactgacccttcttcaggtagccagcagacagaaacatcttcctaaggatacccttctatctncagactcttcttttgaatatgtcccacctaagccaaaaccttntcgtgttaaagaaaagttnctggacaaaacatggacatngaggatctaaaatttggtcanagcatctgtgaatgagcatgangat

SEQ ID NO: 738 - DNA, 795 bp, Homo sapiens
  misc_feature (1)...(795): n = A,T,C or G
aatccctttgctttaanccttgtttgaacccctttggaactncctctntntgnaggatcccatcgattcgaagagcncangcaggaagagagagaccctnactgctgggganttnctgccacactcaagtccccaacccactggaatctcccctactacaagtgccatgtanaccccttgaaaaggggaggggcctagggagccgaccttgtcatgtaccatcaataaagtaccctgtgctcaaccaaaaaganaantananaaaactcnagcctctagaactatagtgagtcttattacgtagatccagacatgattnganacattgatgagtntngacaaaccacanctcgaatgcngtgaaaaaaatgcnttatntntgaaanntganatgctatatnnntcattnnttaccattntantctgcagtaaacaaantttacagcancnnttgnntngatttcatgtntcaagttcaaggnganntgtttggcgttnatntaattcggcccnacncgngacccttttgcattgggcccnnnacccanctntagttccctnttagngaggggnaattgcgcnctttggcgtaataatngggcanangctgnttttcccnntgtnnaaattggtttatccagtttannaatttcaacacgatnaatatcaaacccggtaagcnattaaatggtnaaaaacnntgnggggngcccttaangagttgaacttaaccnganattaaattgcnnttncgcnttnaatntcccncnttttaaatccnggaaaaccttcccc

SEQ ID NO: 739 - DNA, 763 bp, Homo sapiens
  misc_feature (1)...(763): n = A,T,C or G
ttnnnnncctcatnaatcccttctttgatccctcnccncaaaacccttggcnactcgctctttntgcaggatcccatcgattcgaattcggcacgaggcanccttcgcctcctgggttcaagtgattctcctccctcacatcccaagtagctgggactacaggcacgtgccaccacacccagctaattnttgcatttttagtacaggcagggcttcatcatgttggccaggctggtctcaaactcctgatctcaagtnatctgcccactttggcctcccaaagtgctggcattacaggaatggagccaccgcgcccagcctgatttctttanntangtcttgtcangaaanatattgantctnttgattcntnaacatggcnttnggtcgtctttaatnngnctcatcantgcctccatgtgttnttgatgccttngaactggtatttttaaaatnncaatttctaattgnnnattatnnaaacacaattgggntnnatatattggcattgtattaatgcaactttcctaaactcactagtaattctagtagcntnanttggtanattcttaaggatttnctgngtnaatagncatgtcatctgtgaatnaagccattctttganccttttcaaattttgagccttgtatttcttattcttaccatatcacattggcaaagacctccagtatganattgaataaangtggtganagaaaacaccctnctaaaantgctngaattacaggcatgaaccaccntn

SEQ ID NO: 740 - DNA, 765 bp, Homo sapiens
  misc_feature (1)...(765): n = A,T,C or G
tnnnnnnnnntttttnaaccntttnttgnatncntctntcaaatcgcttggctacttgttctttttgcaggatcccatcgattcgctagcctgggcaatatagtacgaccctgtctttactaaaaatgcaaaaattaaccacgtatggtggctcacacctgtagtcctggctactgaggaggctgatgcaggagaatcatttgaacccaggaggtcaaggctgcagtgagctatgattgcaccactgcaatccagcctggacaacacagtgagaccctgcctcacaaaaattatattctgattttctgagtccatgaacacattgtccaaatggatttttctagctcctccaagttacagatagttccacgcacacacagaactcaccactctcaaatattttccccactagtattactattaaatttttcaaacatgcaaaagatgaaagaattgctcagtgaacaccatgtacccaccacctagattctacaattaacattttaccctactttctttatcacatatatgtacctatccatctatccattcttccatgaatccatcaattcatctaattttttatatatttcaagttaagttgcagatatgtagcttatgtttcaccttaaatgtttctgcctggctattattaactggagtgcaatatgtttttggntcttctttatggtaaaatctatgttcagtgaaatgcacaagacttangtatgccattaatagggtttgacgaatagacaaaccttn

SEQ ID NO: 741 - DNA, 753 bp, Homo sapiens
  misc_feature (1)...(753): n = A,T,C or G
ttnganccnttnnntnnttnnntnaatgaagccatttgctacttgntctttttgcaggatcccatcgattcgaggaaggtggaggggcaggnaacaggacggacaggccccgggctctggcacatcctggggaacaagggaccacaaggacgggggcagtctccagacttcccctgggcgcttgaccccaggccttgcaggggagagagccagggcctccctcaggtctttgttcatgctgttttccctgccgtggacaccctttcccgctctccgattctctaaatcctgccccatctcccagatcttgttcatgtccaagcttttccaggaagtcttagcagctcccacaccgcagagctcgagatgtctccctgacttggtcccagaccccaactatgtgcaagcatccacttatgtgcagagagcccacctgtactccctgcgctgtgctgcggaggagaagtgtctggccagcacagcctatgcccctgaggccaccgactacgatgtgcgggtgctactgcgcttccccancgcgtgaagaaccagggcacagcagacttctncccaaccggcacggcacacctgggagtggcacaactgccaccagcattaccacagcatggacgagttcanccactacgacctactggatgcaaccacaggcaaanaangtggcccanggccacaaaggccaatttctgnctggaggacancacctgtgacttnggcaacctnaaacgctatgcn

SEQ ID NO: 742 - DNA, 767 bp, Homo sapiens
  misc_feature (1)...(767): n = A,T,C or G
tngancctttcgnttctncnctcctaagcctttgctacttgctctttttgcaggatcccatcgattcgcaggacatggagcagtacctgtccactggctacctgcagattgcagagcggcgagagcccataggcagcatgtcatccatggaagtgaacgtggacatgctggagcagatggacctgatggacatatcggaccaggaggccctggacgtcttcctgaactctggaggagaagagaacactgtgctgtcccccgccttanggcctgaatccagtacctgtcagaatgagattaccctccaggttccaaatccctcagaattaagagccaagccancttcttcttcctncacctgcaccgactcnggcacccgggacatcagtnagggtggggagtcccccgttgttcaanccgatnaggaggaagttcaggtggacactgccctggccacatcacacactgacaganaggccactccggatggtggtgaggacagncactcttaaattgggacatgggcnttgnctggccacactggaatccangtttggctgtatgcngaattncacctggaaaagccaaggttggtntataganggtcttgatttttacntanttgncaataatgggttgagnaaacttaaagaaccagtttaacaataaaatngttagggacccgttnanaaaatggangtctnccttccatntnaacctggannccttnaaacntttntgngtccnaattttcgttncatccannn

SEQ ID NO: 743 - DNA, 768 bp, Homo sapiens
  misc_feature (1)...(768): n = A,T,C or G
naancctttcnnncttcgcnattcnaanngntnggaaagctcantcgctcnatagngcnngggcttcgcgagnnntggganatnacanaggctngttancataccngtttttnactgcanaggnnnccacangcagcatggcccatgnnatgnccatgccantgatggcnggnggccatgctgtcagcgganncgcacttgtgagganccnntntgganncngtanncnacanncacccccagtctggnacccnagtgttcttactacaccaantgaaacgctggnnagccaagagcccngatggcccacgtnccctgcatgganccccctgancngactccaccagcctatacangnggaagccanaagcagctgttttcngccntgccctgctgataatgccttgaagaccccatacgacctnnacggnctacattgacantnngactgtgncancctngatcagatnatcctggaactgggnccnngattccaggancttnccntcaatggacctgggngcttgtaatcngttntggaccatacanccnttgtannagataaaaganngaggaaatctgaaaccntngnaataagatctgnggcattagtnnntcaaggggaggntnggtnncaaaacnctatgaggaagaacgatggnactatgtccatgnaaggggaacatntantgttggannatgcnatgcaancntnnccntgatntaacnctttganaaactnangcttnacaaagggggaaaaanact

SEQ ID NO: 744 - DNA, 757 bp, Homo sapiens
  misc_feature (1)...(757): n = A,T,C or G
tnnnnncnnttnnnnttnatncntctctcaaatcgcttggctacttgttctttttgcagggatcccatcgattcgcttgacctctgtactttaaaggaaatcactaaccaaattttcaaagtttccttttaaatgcgtttagctagaaatctatgtatttatccctttcctattttgcattcttctcccactatttttaaaaactcatttacagtagaaaccattcttctttctcccaacagtatcctttgccaagaccatgagaacagtaaggagcatgttgttggtcagggtttcagaatacgcgtgatgtcactgagaatgtttgctcacagtcaataattgtctttgtggatgtgataattttggagatacacttctggtcagaactcaggtgagataatcttgcaatactccaaatgcagatactccagccacccgcaaggttccaggaaaggacaatgtcctgcgagaaaatcaggaggcctccacttcctgggccacttgagaagttcctgggcatgtcactacatgttggttgactcagccatttctcatgctgntttgtttcttgcggtggccacttaaccccaaagaatgaanggaggatccacagtgaaagtgcctgagtttctctatgagaccagatgctgtcgaaaccaaacatcttttcctttgctctatnggaacattttaagggttggtttgcacaactggttttcagactnggaagattaccaagtttgggtcccccctn

SEQ ID NO: 745 - DNA, 751 bp, Homo sapiens
  misc_feature (1)...(751): n = A,T,C or G
cttnttnnntttnntttgatncctctacncaaacccttggctactngctctttntgcaggatcccatcgattcgaattcggcacgaggaanaacagacaggtttcaacatggatggatctgaaatgctgttgaagcatatcatttgcataaaaatcagggacagtttccaaagaattatatatttttttcagttggctctctagttagtttttttgggagtaaggacaaacctggaatagatagcaaaactgaaaatcancagtgctgatggtggtacatatgtctttcctttagcttctcccctgataattcccatctgcttttacttcgggtgagcagagggggatgtgtgtgtgcgtgtgtgtcagtctgtttgtgagtgtgttaaaggctacagaccacagttggtttaaaatgcttggaacttcccaaactggctttactttatgtttatacagtgctcagggttaacgcagtacatccatgccattgctgtgggaggtatccccggatgcatgtgttttgagtctataaatatagaaaatatatattggtttctttttccaacttaatangtttattaaagcatgaaatgaaagggtgcatatcatgcattcaagntatntcctaatttttggtctgacagtgcatgtctttggagcatgctgaaacaanaatnacacaggaattgantaaccngaaagaaacattgttaaatgtccaacatttgttatgcatttntattggggg

SEQ ID NO: 746 - DNA, 760 bp, Homo sapiens
  misc_feature (1)...(760): n = A,T,C or G
tnnnnntntnnnnnntttnnnttcntnnnnctttgaanccctttgctacttgctctttttgcaggatcccatcgattcgctgaaacaaaagatgtatttcaattaaaagacttggagaagattgctcccaaagagaaaggctttactggntntgtcangtaaaagaagtccttcaangcttagttgatgatggtatggttgactgtgagaggatcggaacttctaattattattgggcttttccaagtaaagctcttcatgcaaggaaacataagttggaggttctggaatctnagttgtctgagggaagtcaaaagcatgcaagcctacagaaaagcattgagaaagctaaaattggccgatgtgaaacggaagagcgaaccangctagcaaaagagctttcttcacttcgagaccaaagggaacagctaaaggcagaagtagaaaaatacaaagactgtgatccgcaagttgtggaagaaatacgccaagcaaataaagtagccaaagaagctgctaacagatggactgatnacatattccaataaaatcttgggccaaaagaaaatttgggtttgaagaaaataaaattgatagaacttttggaattncagaagactttgactacctngactaaaatattccatggtggtgaaagattttcaagcttgngaatttgtaaattttnaactattatctaactaatgtnctgaattgccnttggctgtactgggttatcattttattaatggtaaataaa

SEQ ID NO: 747 - DNA, 786 bp, Homo sapiens
  misc_feature (1)...(786): n = A,T,C or G
tnngnctttannccntttnnattgnnnnnnnttgaaacccttggcnactngctctttntgcaggatcccatcgattcgaattcggcacgaggaggctgtgtcaaagaatgaatggaacgcctactatgaggaggtgggtgtacgtnctaganggagatcgagtacatgatccagaagctccctgagtgggccncggatgagcccgtggagaagacgccccanactcancaggacgagctctacatccactcggagccactgggcgtggtcctcgtcattggcacctggaactaccccttcaacctcaccatccagcccatggtgggcgccatcnctgcanggaactcagtggtcctcaagccctcggagctgagtgagaacatggcgagcctgctggctaccatnatcccccagtacctggacaaggatctgtacccagtaatcaatgggggtgtccctgagaccacggagctgctnaagganaggttcgaccatatcctgtncacgggcagcacgggggtggggaagatcatcatgaccgctgntgccaagcacctgaccctgtnacgctggaactgggaaggaagagtccctgctacgtgggacaaataactgtgaactggaccttggncttnctaacattggncttggggggaaattcatnaacaagttngccaanacctgcgtgggcccctgaaatacattcttttnggacccccttgnatccagaaccccaattgnnngnngaaaacttnaaanaaantnnctttnaaaannntttttnct

SEQ ID NO: 748 - DNA, 722 bp, Homo sapiens
  misc_feature (1)...(722): n = A,T,C or G
tggaactngctctttntgcaggatcccatcgattcgaattcggcacgaggaggaagaggcctgctccacttgtctgggaacctgggcaggaggcacagaggaagccaaggcctggagctgcaggtcccccggcatctctctctgtcccggcagcccaggatggcctggtgcccccacctgctgcagcaggagccccaaggagtgctagctgagggtggttgctggggtggtcctcatggacagtgaggtgtgcaagggtgcactgagggtggtgggaggggatcacctgggttccaggccatccttgctgagcatctttgagcctgccttccggtgggagcanaaaaggccagaccctgctgagttanaggctgctgggatccactgtttccacacancnggaaggctgctgggaacaggtggcanagaagtgccatgtttgcgtngaaccttgcantcttncanctggggactggtncttgctgaaacccacgagctgnacantnangagctgtccancttgcttggctcactgngaccaggaaagcctgtctttggttagctcgtgtcttctgcaggaaaaaaaaaaggatgtgtcatttggccatgatatttgaaaaaggggaaggatngccnaantttgtttnccatttattccagtanttggaaaattttttgaccccctnngcttaattcttttgcaanaactactggggggtntg

SEQ ID NO: 749 - DNA, 821 bp, Homo sapiens
  misc_feature (1)...(821): n = A,T,C or G
tttnaanncccttgctactngttctttttgcaggatcccatcgattcgtngacatagaaaacatacagtaagaatatggtattataatcttacggggaccactgtcaaatcgcggtctgtctttgaaaagttgtnatggcggcgcatgactataaataccctagctggttagcatttacattccttgccagggagtttgaaatttatnctnggcgggctgnctttaggntttaggtagagttaaagaggtaaagcacatgtttgccacaacccaggaaagtatttttaagaaagatttggattttcctacctttagagatctaaaaaaaatttaatataaaaaatcattttgagntggtgtttattactagttcagaatgagtggctgctgaagggggcccccttgnnattttcattataacccaattttncactttattttgaactcttaagtcataaatgtataatgactttatgaattagcacaggntaagttgacactttgaaactggccatttctgnattacactatcaaataggaaacattggaaagatngggaaaaaaaattcttattttaaaatggcttagaaaagttttcaagattactttggaaaattctaaacnttnctttctgngttccaaaactttggaaaatatggtagatnggacctcattgccatttaagactggttttcaaaagctttccctcaacattttttaaaggtgtgganttttccctttttaaatattccataatttaantttccttttnaaaggccnctnnttttcccaaacccatngncttttggggnaaatcccc

SEQ ID NO: 750 - DNA, 770 bp, Homo sapiens
  misc_feature (1)...(770): n = A,T,C or G
gntttnnnnnnnctttnttnnntgnctntttctaagagcttngcnnatgctnggtcggcacgaggcaacatttgtctacaactctactgtaaaattggaaatgcttttccacagaaaaacctctcaaaatgctgaatgcaaaagttgggatcacagaaacattgtgcctatttttggtctgctggaaactgtatttntacaaggtaatccctgttctcaatatagttcctgtcttgccactggcggttttcttgtagcatttttctagttctgagattgctactacccaaagtattcatttctttcttactggggtgtcctctgtcttcacagcctgcttctggattgtaggttttttcctttctttctgttgagatatttatggcatttgatagagtcaaaccagatgtattgcagccggacatacttatgtggcttcagatgtgtaaaataagtaacttcctatctttgtctgtctagctcaagagttgactgtggacgaggaatgcctgtattgattcattaatgtaataactatttactgactgcctaccatgtacaaccagaaacacagttcctaacctcatgaacttaccatgtaacatgggaagacaagcctaagttcttatttggntggnaattgcgataacgctcacagaacaaattcccgattcctacgaacccatgtataggggggaaatatttaaggtcccatttaatactgacattngcccncccccctnntattttaagctgagaatctgaaggnn

SEQ ID NO: 751 - DNA, 774 bp, Homo sapiens
  misc_feature (1)...(774): n = A,T,C or G
cgttnnntttccncctttgaagccctttttgcaggactttcnaatncttggtagactttatgtcagttctgtgtagactttatgtcagtttttgtcattatttgaaaatctattctgacaactttttaattcctttgatcttataagttaaagctgtaacaactgaaattgcatggatcaagtaagcatagttttatccagggagacngctcnnnggaagccatagaattgctctggtcaaaaccaagcacaccatagccttaactgaatatttaggaaatctgcctaatctgcttatatttggtgtttgttttttgactgttgggctttgggaagatgttatttatgaccaatatctgccagtaacgctgtttatctcacttgctttgaaagccaatgggggaaaaaaatccatgaaaaaaaaaagattgataaagtagatgattttgtttgtatccctacccatctcctggcagccctactgagtgaaattgggatacatttggctgtcagaaattataccgagtctactgggtataacatgtctcacttggaaagctagtccttttaaatgggtgccaaaggtcaactgtnatgagataattatccctgcctgntgtccatgtcagacttttgagctgatcctgaataataaagccttttaccttatctggaaaaaaaaaacattntanancaaaaaaaaactnngagccctttanaactnttagngagnccnttttccgtagaatcccngacntggntaaggaancnnnc

SEQ ID NO: 752 - DNA, 778 bp, Homo sapiens
  misc_feature (1)...(778): n = A,T,C or G
gntttgaannccnttgtttcgnatcctttttgnaggactctgaagncctttgttcggcncgagaagaaactctgcctcagaaaatgtttacagcttccagtggaatcaaacataccatgaccncaatttatccaagttctaacacattagtagaaatgactcttggtatgaagaaattaaaggaagagatggaaggggtggttaaagacnttgctgaaaataaccacattttagaaaggtttggctctttaaccatggatggtggccttcgcaacgttgactgtctttagctttctaatagaagtttaagaaaagtttccgtttgcacaagaaaataacgcttgggcattaaatgaatgcctttatagatagtcacttgtttctacaattcagtatttgatgtggtcgtgtaaatatgtacaatattgtaaatacataaaaaatatacaaatttttggctgctgtgaagatgtaattttatcttttaacatttataattatatgaggaaatttgacctcagtgatcacgagaagaaagccatgaccgaccaatatgttgacatactgatcctctactctgagtggggctaaataagttattttctctgaccgcctactgggaaatatttttaagtggaaccaaaataggcatcccttaccaaatcaaggaagactgacttggacaccgtttggaaaatgggtaaaaacggtggnttactggtganttggggagcnagaaccggacccactggtatactggggantaacaatttttttc

SEQ ID NO: 753 - DNA, 775 bp, Homo sapiens
  misc_feature (1)...(775): n = A,T,C or G
gcttttgaaacccttttgttaacgcctttctgcatgatcttctcgtccttgaaagggccctaaaagagatgaacaataccgtatcatgtggtttgaattagaaacccttgtcagagcccatatcaacaactcagagaaacatcaaagagtcttggaatgtctgatggcatgcaggagcaaacccccagaagaggaagaacgaaaganacgcggctgaaagagggaagacaaagaggacaagtcagagaaagcagtgaaagattatgaacaggaaaagtcttggcaagactcagagagattaaaaggaatcttagaacgtggaaaagaagaattggctgaagctgagattataaaagattcgcctgattccccagaacctncaaacaaaaaaccccttgttgaaatggatgaaactccacaagtggaaaaatcaaaagggccagtgtcgttattatccttgtggagtaatagaatcaatactgccaattccagaaaacatcaggaatttgctggaccgtttgaactctgttaataacagagctgaactatatcaacatcttaaagaggaaaatgggatggagacaacagaaaatggaaaagccagccggcagtgaagagtgacttgangaactaaattttagcatattgcaaaaatattttgtgcgggaattcgatatnagtacttttaccagcaagatggnatngttatgtttgcctggactggnttttacatttttnaaattttttcagtgnccttttttggtcctaaattatc

SEQ ID NO: 754 - DNA, 1032 bp, Homo sapiens
  misc_feature (1)...(1032): n = A,T,C or G
ggnntttttcccaaaaaaaaggggccccctnggggntttttncncaannggncccctttttctttgnccagggnaacnttttttgngaaaaganccccctttttggatnnaccggggccccccggaaggttccnaaattttnagggttnaaacccaaatccttggggaaaaaaaaaaaacccagggccntntntggggnccccctngggggggtngggaaaaaaaaaaaagggggaatggcccccaaaaaaaaatnnggggcccctngggggaaaaaaaagggaaagcccaggtngggaanggaaagggggaaggntcccccggggggaaaggaaatgggtgggtnggnaatggcccaatggttggaaaaggcccaaaccaatttgggntntaaaacaatttcaacctgggggggtcctggcccanaaaaaatgcngggcacccncgnggggtctggcttaagaattggttacaagggcaaagggaaagggaagagttctagagataaagaactatatgcttggatgaagtgtgtgaagggacagcctcatgatcacaaacatttaatgccaacccaaattatacctggttctgttttgacagatcttctagatgccatgcacactcttagggaaaaatatggtattaaatcccattgncattggactaacaaacagaatttacaagttggaaattttcctacaatgaatggtgtatctcaagttttacagaatgntcttaatcacagnaataaaatttctctgtgcatgcctgagtcttcagcagcaaaaatactcctccgaagtctgagaaaaatggnggcagcagcccaagaagagtgatgtaggcacagataacnaaggntaacctcctccagaatccccagtcaccactgcactggttaagcagaacttngcaggagcaaaaaagcccnganganggaaaaaaaaaannaaaaaaaactcggagccctcttagaactatanggggggccgnnntaccgnangatccccgacctgaanaggaaccccc

SEQ ID NO: 755 - DNA, 798 bp, Homo sapiens
  misc_feature (1)...(798): n = A,T,C or G
ngnnnnntttnncccnacnaaatcccttttttgaagccttctantgncttcatcgtnctggtaaattggntgaattattgtattgaagcttgagctgtattttnaagtaatttnggttncccctaagatgttattatgttagggacataacacttttgggaggttgttgtgggagatggttgatttaggttttcaaaagctagaaataaaatttacatnnccccggntnncataaaattctgctctaattgggtggaaggtgctgtatctaacttgtgttcctnctaaggttatgtcctaataactattcttttaggagtatacttctactttatagaaggttgctttttctttttaattttntctaacaaagaaaagaatnaagtatttattaataaagaaccagaaagcacttgaaactgatgtttttaaatgggctcacttanggtagatttatttatctcattaacttaaaaacagctatgtgnattgaaataagtcacaacagaacttgaacaccagggtgggtgtctgagcaatcccctttcttatggggaaaaacaaatggttcttgtttgaacangaaggtatcattgcagtcngcattcacccgtgtataattgnnatataagntgnataatatgctcgtaaaggctnaaggtnagctggatctggatgccctttnaccaattangattttaacttttaanaataaaatttnaaanctaattgncnaaataaaaaaaatannaaacttcggncctctacaanttntagatgngtcgattnncgnncanc

SEQ ID NO: 756 - DNA, 834 bp, Homo sapiens
  misc_feature (1)...(834): n = A,T,C or G
tttgaaacccntttnttnaagcctttttaatgactttancgncctttattcggcacgaggtccttcagctggtagcttncattcgnanttnnanatantatntgtgcatgcncnnttgaatttttgtggaagaacagantgcagaagaaggcnaggaaagccgaagagantnntncggcancagaagcttaaagnaggccaaactggtggtgcnctttcctcggnacagaagctggatgactatggccaatttggagaaanagctccaggagatggaggcacggttcgagaaggagtttgnagatggatcggatgaaaatgaaantggaagaacatganctcaaagatgangatggatggtaangacagtgatgaggnccgaagacnctgagctctatgatgaccttttactgnccancatgtgacaaatcgtnaanaacagtaaaggccatgaanaatcacntagaagtcaaangaaagcnnttgggaaaaatggnggnnctttgntaaaaccacnagctggangganggaagaannnaaaattttttaagnacctcaaattgattgaaaaatncattatgatgacaattcctgnangaataaattggnagatgcnctanaancaaaangcnttttttnantnnaaananacaaannntnnagcctnttngaacntatagtnnannctncntttanctntntatcccggactttnttntggataccnttgactnagcttttggacaaaancncnactttgtattncattngnnaaaaaaatgcntttatttttcgnaaatttggtgaatncntaattngntnntattnnnnnc

SEQ ID NO: 757 - DNA, 1062 bp, Homo sapiens
  misc_feature (1)...(1062): n = A,T,C or G
tttttccaaaaaaatcncccccnttttttggccttnaanananngggcccccttttttttgggccaggggaatncccccaatnccggaattttccggggtntttggggggnttggaaagggccccttggggaaagggncntttccnaagnaaaggggtnggaaaattttntaaatggccttttnggggggaaaaagccccctnggaatncccccaaaaaacccttgggaaaaaggggggaaaaaggggggaacctttngggnaatccttncccnttnaataatttggggnaattaaanccctggtttgggaaagggaaaagggttggtcttggtcttgggggaanggaattgggggccaanttaaaatggaaggtttggccanaatnggccncttcgggggcttnttcaaaagccaagcctttggganccctgcttcatttttngggccctttnctgccaaggaancccaacccttaacttancaggaaaanggagatgaaaggccttcttccaaggaaggtaaggtcctttggctgccccnacttaaatgctttttgaaantctcttagatgtggnaaatattttttccgaaccttgaaatcaactnggtagaatttcaattggaagcataatccattgtaaaatatattttagttgatatttggtaaaatgccttttttggtggtgtggttngaatcctgggtttcccaagaatcttgnatttcaaatggtttaacaaangggaaggaaagggancttttcccttaaccttccctttttgaccaggaaagattttnaaaagtacctttctttttaaggaaaaaaaaaaattaaattttgaagaaaaattgggatttggattttanaaaaaangggaaaaaaaatatnantattnatanntcnnannatnnttnatnntctanntanttnctntnnntantnctnntntntnnannnnanannnannaaataaatantcnnncatncttanctacanatnccnntcttnnttntannactttnannntanntatctaantctntccctattntaccctnnc

SEQ ID NO: 758 - DNA, 845 bp, Homo sapiens
  misc_feature (1)...(845): n = A,T,C or G
aaancccttntttnaaatcctttttanangattcatcgattcgaattcggnacgaggcgctagcgtcggntccgcntgggcccttgcggtgcgctgngggcaggcggtgaggcttacgcntntgcttacgggcaaaaacctgcacacgcaccanttcccgtnnccgttgtccaacaaccagaaggtgattgcctttggggaancttctangncaacnacntgaacntatggacagtgcgctgntttggacagaantgggaacnttnaggntgntgtgcgcttcnagcatntgggcacctttgtgttcctgtcantcacgggtgagcantatggaagccccatccgtggggcagcatgaaggtccacggcatgcccaattgcaacacgcacaaatacttggaangccatggaangcatnttnatcaagcctaatgtgggagcccttttgcaagtcacgaattaactctnaanngtntggatggattgggtgggantgganggttgcaagttngggccnttttgaaaggccactttttggnaaaaaacttttgggtttttaangggttcntcaaaatgccctttgnnaattnaaagaaatgttgggcctattnaaaaaaaanatnatactttatntaatctnnataataatanttantaataaaantcttnnagcctttttaaaantttttaatgaanctctttattttancgttanantncntaacntttaattaaaggaataacaatttgttgaanttttggtataaanancccccantttttaaaattcntntngaaaaaaaatncntttattttggtaaaaatttgnggaatcnnttttgctn

SEQ ID NO: 759 - DNA, 947 bp, Homo sapiens
  misc_feature (1)...(947): n = A,T,C or G
tnggggggggccccnantttggggccccaaacccttnggggaaaccccccttnnnnntttttnccnttttgggggggaaangcccccccccaaangnaaaaacccnttttnnnnaatttnngggnangggntntggggncccnttaaccccaangggggggggttttnancctgggggnnnaaaatngggggaanaantnnnnaatgggnantcccttnaangggaaaaanaatttnnccttaaggnnatgggncattaatnttnatccctantggattncaatttcattcgnattaaaggcttttactggnataatccttnncggcccgcnctggtagtttaaagtgcccanaanttgaatgggaaatnacgggttttgaaaatcgcacaaagcagtgccnggcacngaggngtcacgccngtaatnccagcattttgggaggcctgaggcangcggatcacganggcaanagagtccagaccattnctggctaacacngggaaaccccgggnctaataaaaaatcaaaaattaggntggacatggtggcacgtgccngtaatcncagctacttanggaagctggatgcaggaagaattgcgtgnnanccnggccccngtggaangntgcattgatacgaagaaccgtgccaaatgaanttanannctgggcngaannngagcggaaaaagccctntttaaaaaaaaangggantggaaaaantggtgccanagncatnnggggaaaaaattttnnnnttnnttnancggttttnancttgnggaaggccntctttaatnttggggaaaaggcacttttgggntnggttttggaaaacgnntggcttttccctttnaaaagggaaaaanggnnttaancccctgaaaaangngcngnnttttaaanggggnnnnaaacanggggnctttggaanccccannaaacc

SEQ ID NO: 760 - DNA, 759 bp, Homo sapiens
  misc_feature (1)...(759): n = A,T,C or G
gnntttctaatgcttgtnnnnngcntttntgcaggatcccatcgattcgaattcggcacgagaagatatgcagagatattccaggatcttttagctttggtgcggtctcctggagacagtgttattcgccaacagtgtgttgaatatgtcacatccattttgcagtctctctgtgatcangacattgcacttatcttaccggctcttctgaagggtctatttctgaactggagcagctctccaattctctaccaaataaagaattgatgacctcaatctgtgactgtctgttggctacgctagctaactctgagagcagttacaactgtttactgacatgtgtcagaacaatgatgtttcttgcanagcatgattatggattatttcatttaaaaagttctttaaagaaaaacagtagtgctctgcatagtttactgaaacgagtggtcagcacatttagtaaggacacaggagagcttgcatcttcatttttagaatttatgagacaaattcttaactctgacacaattggatgctgtggagatgataatggtctcatggaagtanaaggagctcatacatcacggacgatgagtattaatgctgcagagttaaaacagcttctacaaagccaaagaagaaagtncagaaaaatttgtnccttgaactagagaaacttgntntggaacatttcaaaagatgaatgacaatctggattcnttggtngacagtgtaatttggactttaaccngatgctcg

SEQ ID NO: 761 - DNA, 752 bp, Homo sapiens
  misc_feature (1)...(752): n = A,T,C or G
cctnactaaacctttgcnaangccnttnntgctgatcccatcgattcgcaggcctggacttcgcccccaggcctaggaccgcggtgggtnttaaccctgctnctgccccaacagggactccaatcaatcggagttctccccttgccggagctgcccttcacctttggggcccgagacagtcataagggatggacttacntttcttgcagggaaaaaggtggacagccgtgtttcttaaggatgctgagggcatggggccaggaccaggggagaggcacagctccttcctgagcagcctctcaccactgccacaaggctccctaatgctggtctctgctccactccccggcttcccgtgaggcangaggcagagccacagccaaggccctgaccacttctgtgccagttgtctaagcagagcgcctcagggacgctggaaatgccttaaggatagaggctgggcatcacatcaaatgggactgtggtgtttggtgaaaaccttcctgaggatctggattcaggaccctccatgactggcctatttactggttacagctggccagtgcananctgctgctcttttacctttttaggcccctgtaacttnccacctttaaactgcccaanaagcatgcctnttccacaggaagaagggagcagacagggaaatctgcctaccaanaagggtgttgtgtgtctttgtgcccacacgtggtggctggggaatgcctggatggtgccgtggntgatct

SEQ ID NO: 762 - DNA, 1032 bp, Homo sapiens
  misc_feature (1)...(1032): n = A,T,C or G
ttctaatgcttggaaacgcnttgatgnangatnccatcgattcgaattcggcacgagggcaagtggtagtggcgcttntcgggtgntgtgcttcacgttttggtctaaaggncgagactgttgtggcnacngngnaantntacnggaanggnttaaantntnnntgnagtnggaanaattcnatcngaangaanttgggggggntagnnnnggttanatnattgatgaatggnttcaanatngnaaantttatnancganatgnnatanttnnaaangangaccaactgggntnanatggagnannnatnaannggntaancnatananatantncatttggtanganaatngangaaggattntcaaatagncatgtnggangatgaacntnnaggnnnnagaatatttggataaaattggtantatgaagatntggnntaataataccnanaaatnnnnnantttnatnanngangaantagganttnatgnctatgnggatannntnnanntatnatagngataaantatgatactgtttannntatntnganttagtnattnaatgntcttgtnanaanttattttncgntagttagntagnnntatnnactttggnaancananatgtaattctctctanacgggaatntttntatnntnnntatcaagaggtntntnnattgnaaatantatacnnttgnanaaantatatcnatanaanaaanggnnattattntatatgancaaanaaaaaantattgngganntanattatctctcatnatngattatncngtantgtataatggnnnataantatgtnnntntaanataaatggatataagtnttatantatgcncntnaaggnggtcnganaantatgtaattatattnangctanatacnatnnanatgtntnactaaatatngntgtgaaangtntgcgnggnaaaatntgttantantnaaacanggtataganatatanatgngnngaatatctactatntgtanatacttatanca

SEQ ID NO: 763 - DNA, 817 bp, Homo sapiens
  misc_feature (1)...(817): n = A,T,C or G
aanncccttntttctaatncttggctactcgtnctttctgcaggatcccatcgattcgaatttcggcacgaggggagggacccttggggncaggttgtgggtagccagttgcagtctgtggcctccctcagaggtttggagtcgggcgtggcatgctgctgttggcctctttccgagggagtgccatccactccctgtcccaccgctnnccctngtgaggacagtgagggcagtgctacgtggtggggaggtgtgtgtgaagccacggaagggcttcacagggcaaatgccaaggccagtgggccccggacagagtnaggctccctgggcggncttgtgtcttggtggccctgatcatcctgccaatgcanaaagccagcaggcaagagacccctactccctttaaggaccattagcataaacaaaccattgngttgaatgcaatgatccaggtgcactttnagggtacaagctggactngttggaacaggattacatggaaaannggaaangggggcangctgtctcttgggacatnagtaatgtctttttacccanttgncactctngaanttcaaanttggncatgttttctggggcctnctngnaaaagcagttttttcaccncatnatgaagaaaaaacttgttggcttgganngtanngggattnttgntnanacttnccctaaanggntncctttnggggcatttntgaaggntaaataatgggggatacctttttaannttccttgcagatttaaaaatgttccttaaanganncctcaatgnttnggtcttnttccaaaaaacnattc

SEQ ID NO: 764 - DNA, 777 bp, Homo sapiens
  misc_feature (1)...(777): n = A,T,C or G
taatgcttggntctcgnttttntgcaggatcccatcgattcgaattcggcacgaggtccacggtgctgaacatcatcatctttgaagactgtaggaaccagtggtctatgtcccgaccactacttggcttgatattgcttaatgaaaagtatttttctgacctaagaaacagtattgtgaacagccagccacccgcgaagcancnggccatgcacctgtgttttgagaacctgatggaaggcatcgagcgaaatcttcttacgaaaaacagagacaggttcacccagaacctgtcagcattccgtcgagaagtcaacgactcaatgaagaattccacttatggcgtgaatagcaatgacatgatgagctgacacctncttggactctacctgtacagagcagcgtccctttggtttggcccagaggggcgaacaattgcaagggagagggcctggctgatcctggctcttttctccaggggtgtggggaaaaatggcaaaggtcaactagctgcttccccaagggaataggggtgtgagtacactcactanggggcaaggcgctgcttggttcctggggggactgggtgggaaagggtggtgnganggagataaagagattcaaactgagactccagtctttccttctgggggccacccaaagttggggagnaaccccctantggtncctgccaacaaccttgccttgggattaaacattntncatttttttcantaanatttttgaacaaagggttantattgnctnaagtttann

SEQ ID NO: 765 - DNA, 774 bp, Homo sapiens
  misc_feature (1)...(774): n = A,T,C or G
ntttctaatgcttggctctcgntttgatgcangatcccatcgattcgggaaatgcaagtcaaaacagctttgtaggtctcagagtttgcttttaagaagtagtacaagaaggaatagttatatcaatacaccagtggctgaaattatcatgaaaccaaatgttggacaaggcagcacaagtgtgcaaacagctatgganngtgaactcggagagtctagtgccacaatcaataaaagactctgcaaaagtacaatagaactttcagaaaattctttacttccagcttcttctatgttgactggcacacaaagcttgctgcaacctcatttagagagggttgccatcgatgctctacagttatgttgtttgttacttcccccaccaaatcgtagaaagcttcaacttttaatgcgtatgatttcccgaatgagtcaaaatgttgatatgcccaaacttcatgatgcaatgggtacgaggtcactgatgatacataccttttctcgatgtgtgttatgctgtgctgaagaagtggatcttgatgagcttcttgctggaagattagtttctttcttaatggatcatcatcaggaaattcttcaagtaccctcttacttacagactgcagtggaaaaacatcttgactacttaaaaaaangggacatatttgaaaaatcctgggagaanggactatttggctncttttgccaacttacttcatactggnaagccagattantngctcaaggaagttttgatgagccaaaaaagttttn

SEQ ID NO: 766 - DNA, 779 bp, Homo sapiens
  misc_feature (1)...(779): n = A,T,C or G
ttnnncgctnntgaanaccccttctcctnaaatcctttttaantnccttgctgnntgatcccatcgattcgcgaaattcggtggcgccacgtccgcccgtcttngccttctgcatngcggcttcggcggcttccacctagacacctaacagtcgcggagccggccgcgtcgtgagggggtcggcacggggagtcgggcggtcttgtgcatcttggctacctgcgggtcgaagatgtcggacatcggagactggttcaggagcatcccggcgatcacgcgctattggttcgccgccaccgtcgccgtgcccttggtcggcaaactcggcctcatcagcccggcctacctcttcctctggcccgaagccttcctttatcgctttcagatttggaggccaatcactgccaccttttatttccctgtgggtccaggaactggatttctttatttggtcaatttatatttcttatatcagtattctacgcgacttgaaacaggagcttttgatgggaggccagcagactatttattcatgctcctctttaactggatttgcatcgtgattactggcttagcaaatggatatgcaagttgctgatgattcctctgatcatgtcagtactttatgtctgggcccanctgaacagagacatgattgnatcatttttggtttggaacacgaatttaaggcctgctatttaccctggggtatccttggattcaactatatcatcggangctcngtaatcaatgagctaattggnaaattnggtggacac

SEQ ID NO: 767 - DNA, 799 bp, Homo sapiens
  misc_feature (1)...(799): n = A,T,C or G
gnnnnnnttncccgcctttngaaanccccttctttctaatgcttgttcaacgcctttgctgcaggatcccatcgattcgtggatactgacaatggtggcaggcatttcaagccttttaaattagtactttttgtcgncttgcttattaaaattttgttaattttagcaaagaccaattgttgtgataaactggtgtttttnggatgcttcaagcacacgttaaccaatcngccaatncccctttnggttcctcccattgntctaaaataggactttcatattattaaaacctcaaaagatgatccacccaggatgaacaaagatcaccaaggggaaagaaaacattttttatctttacagaaaacatgttaagattatatatagatgtattctttacattggatattgtattagagtcctccttacaagaaatgaaataggtttttagcactcttagcattagagttcctagattggtgttgatagctacagttttaaaatgtataacctgaaaatgaaggttaattttgcattgtaaagagcacatttgatctatgtaaaaagtgtccatttggtgtattttttttaaaaaagagaaagcactttcatattaagtagcatgtgtatgaatttaagattttcatatttgntgngtctggtattcagtgaagtaaaattgagcattttaaaagtttggtggatggcaaccattaactattaaattaaaagccaccttatactctgctgcttaacttgcttgnaaattgcacctttggnaccctgcacattttcatattnc

SEQ ID NO: 768 - DNA, 826 bp, Homo sapiens
  misc_feature (1)...(826): n = A,T,C or G
gnnnntnncnccctttctaatggcttgtttctaaatgctttttcnaatccttggtacatgatcccatcgnttcgcgctgtgcttgagaccaacctgacgggtaccttctacatgtgcaaagcagtttacagctcctggatgaaagagcatggaggatctatcgtcaatatcattgtccctactaaagctggatttccattagctgtgcattctggagctgcaagacngggtgtttacaacctcaccaaatctttagctttggaatgggcctgcagtggaatacggatcaattgtgttgcccctggagttatttattcccagactgctgtggagaactatggttcctggggacaaagcttctttgaagggtcttttcagaaaatccccgctaaacgaattggtgttcctgaggaggtctcctctgtggtctgcttcctactgtctcctgcagcttccttcatcactggacaagtnggtggatgtngatgggggccnggagtctctatactcactcgtatgangtccagatcatgacaactggcccaagggagcangggacctttctggtgtcaaaaaagatgaaaggagacctttaaggagaaagctaagctcttgagcttgangaaaacaaggggtccttccatnccccaaatgcctttacatttttggaggatatgcctnnnggnacntttttaaaaaagcttatnagttngntatgggnaaaacaattttttccttantttttaaagtggntaataaatnaaantcctaatggnaaaaaaactantccttggnaantattttccaggncttnantgtncccncn

SEQ ID NO: 769 - DNA, 802 bp, Homo sapiens
  misc_feature (1)...(802): n = A,T,C or G
gnnnttctaatgctgttctaatgcttgtcaatncttganacgttcatcgattcgggaagccaagcctggagctgcaggtcccccggcatctctctctgtcccggcagcccaggatggcctggtgcccccacctgctgcagcaggagccccaaggagtgctagctgagggtggttgctggggtggtcctcatggacagtgaggtgtgcccgggtgcactgagggtggtgggaggggatcacctgggttccaggccatccttgctgagcatctttgagcctgccttccggtgggagcagaaaaggccagaccctgctgagttagaggctgctgggatccactgtttncacacagcgggaaggctgctgggaacaggtggcagagaagtgccatgttngcnttgagccttgcagctcttcagctggggactggtgcttgctgaaacccaagagctgaacagtgaggaggctgtccaccttgcttggctcactgggaccaggaaagcctgtctttggttaggctcgtgtacttctgcaggaaaaaaaaaaaggatgtgtcattggtcatgatatttgaaaagggggaaggangccnaaanttgttcccattttattcaagtattggaaaatatttggcccccctttggctgaaattctttttgcaanaactaactgngtggcttgttcncttaccctttttcangnttaattggtttnaattttttgcattgaaattaaagacgtttttaaatttcntttncaanaacaaagggcttanatnccngantcnananattggnanttc

SEQ ID NO: 770 - DNA, 1157 bp, Homo sapiens
  misc_feature (1)...(1157): n = A,T,C or G
cccttttttttttttcccnnaaaaaaanattggggncccntttttttgggnttttttttcccnaaaaaaaaattgggnccctttttggggggnntnaaaaaaannnnnnnnccccccntttttttggggnnnnnnaaanntnnnnnncnnnttnnnnnnnnnnnnnnnnnggnnttnnnggggnnnannccnccccccaatttcccggnnattnttccgggcccaatttttgggaccccccagggnnnagaataaggcccggggnttttttttncnagggncccaaaagggcccttgggccaaaggnaaatccnttgggaaattttgggaatttggcccttggnanntcccaataccggnaaaaatggggaaangnaaaaaaggnttncnccaaattggttgggggggggttccaaagattttcattgggggtncntgggctttcaacccnaaggnaangggtttnctttcaaaaaattacctttaattgccattaagcaattcccaanggttannaaagggtgtttnttctcanctatgcttcganagngaaaatcaacnaatggaaaatgtgttgtaattggtctgcantctacangagaagctagaacattagaagctttggaanagggcggnggagaattgaatgatntttgnttcaactgccaaagagtgttgttgcagtcactcatttgaaaaactattttcctgctccagacangaaaaaaactttatangtttactaggaatcgatttgacaagcnttcangtaacaaacagttctnccaagagatatccttgttnaagaannattanaatancnngaaagcggaaanngtgaataaatnncttcnagaagcccaaaaanncacngaanaagtatggtgggncttactggttagcacgttcttgacnacagatggaaattgaantctngattncctctgattantgaatgaaaaggtgactattnaanagctcttnanataccatgagtntttggancattgattgaccaatttcaannccatttttangatngaattnttatnaatgattnattnanaantgannnccttngtttaaattannaaanaanccntcnaaanacnanaggggatttataaaatctaataananttttnnncntntnaann

SEQ ID NO: 771 - DNA, 760 bp, Homo sapiens
  misc_feature (1)...(760): n = A,T,C or G
ngncctttnatnccttntgaanccntttgnaattnctcnnnnngttgatcccatcgattcgaattcggcacgaggtggaagaaaattttttgctgcttctggttnccagaaaagggagccattttaacagacacatctgtcaaaagaaatgacttgtcgattatttctggctaatttttctttatagcagagtttctcacacctggcgagctgtggcatgcttttaaacagagttcatttccagtaccctccatcagtgcaccctgctttaagaaaatgaacttatgcaaatagacatccacagcgtcggtaaattaaggggtgatcaccaagtttcataatattttccctttataaaaggatttgttggccaggtgcagtggttcatgcctgtaatcccagcagtttgggaggctgaggtgggtggatcacctgaggtcaggagttcgagaccaacctgaccaacatggtgagacccccgtctctactaaaaataaaaaaaaaattagctgggagtggnggtgggcacctgtaatcctagctacttgggaggctgaaccaggagaatctcttgaacctgggaggcanaggttgcaagtgagcccgagatcgtgccattgcactccaaccagggcaacaagagtgaaactccatcttaaaaaanaaaaangaaaactcgagcctctagaactatagtgagtcgtattacgtagatccagacatgataagatacattgatgaattttggacaaaccccann

SEQ ID NO: 772 - DNA, 777 bp, Homo sapiens
  misc_feature (1)...(777): n = A,T,C or G
gaaancccatttnnnnnttccncttcnaatcccttggntactcgntctttntgcaggatcccatcgattcgaattcggcacgagctctactaaaaatacaaaaattagctgggcgtggtggcacacacctgtaatcccagttacttgggaggctgaggcacaagaatcgcttgaacccgggaggcggaggttgcagttagccaagatcgccctgctgcnctccagcctgggcaacagagggagactctgtctccaaaaacaaaaacaaaaactgttagtgaaggttccctgggacttttgatattttaaaaattgttcttatgactagtagataaattcattgccataatgaggctagctcccagataaacagtgtattttcttcttttttttttttggtgagtggtccagagctttaagctacttttccagtagtttgccactttctccgaggtantttggctgctctttcagtaatgctaattgtgtgtcaaattttgtctacaacagtaggcaacagatgaagataagttggttgaatgtctccagcactatgcatccctattttctatttattggggtacactcactttcagtaatgngtttcaaactggtattttttaaaaaacaaatcaatgtaaggactgaagttgaaatanccaatgtaataaagttaattagggttatttttaaaaaaaanaaaaataanaactcnagccctctagaaactatangtgagtcgnnttaccttgaatcccagaccttgataagatacnc

SEQ ID NO: 773 - DNA, 782 bp, Homo sapiens
  misc_feature (1)...(782): n = A,T,C or G
gnntnnattcccctttcnaatncttggcaaacgctctctntgttggatcccatcgattcgaattcggcacgagacagtctcgggtttcatattttgctgtttttgatggacatggaggaattcgagcctcaaaatttgctgcacagaatttgcatcaaaacttaatcagaaaatttcctaaaggagatgtaatcagtgtancncccgccgtgaagagatgccttttggacactttcaagcatactgatgaagagttccttaaacaagcttccagccagaagcctgcctggaaagatgggtccactgccacgtgtgttctggctgtagacaacattctttatattgccaacctcggagatagtcgggcaatcttgtgtcgttataatgaggagagtnaaaaacatgcagccttaagcctnagcaaagagcataatccaactcagtatgaagagcggatgaagatacagaaagctggaggaaacgttaagggatgggcgtgttttgggcgtgctagangtgtcacgctacattggggacngncantacaagcgctgcngtgtnacctttgtgccccgacatcagacgctgccagctnacccccaatgacaggttcattttgntggccttgttatnggctcttnaaaggnctttnccccatnaaggaagccngtggaactttcatcttgncctgnantcgangatnaaaaagnatncagaacccggggaaggggaaaatcctnaannctgacttcccggtttccaaaccagtnttgnaacaaanc

SEQ ID NO: 774 - DNA, 793 bp, Homo sapiens
  misc_feature (1)...(793): n = A,T,C or G
gnannngccncgnttttgattccccttnttcaaatcctttgnnaatcgccctcnctgttttgatcccatccgattcgaattcggcacgagatggcagttgcttttgaagtatatgatgnnttcctccactacaaaaaggggatctaccaccacactggtctaagagaccctttcaacccctttgagctgactaatcatgctgttctgcttgtgggctatcngcactgactcagcctctgggatggattactggattgttaaaaacagctggggcaccggctggggtgagaatggctacttccggatccgcagaggaactgatgagtgtgcaattgagagcatagcagtggcagccacaccaattcctaaattgtagggtatgccttccagtatttcataatgatctgcatcagttgtaaaggggaattggtatattcacagactgtagactttcagcagcaatctcagaagcttacaaatagatttccatgaagatatttgtcttcagaattaaaactgcccttaattttaatatacctttcaatcggccactggccatttttttctaagtattcaattaagtgggaattttctggaagatggtcagctatgaaagtaatagagtnttgcttaatcattnggaattcaaacatgctatattttttttaaaaatcaatgtgaaaacatagacttatttttaaattgntaccaattacaataaaaataatgggcaattaatttttnaaaactttttaaaatagnatgctcatatttttaaaaataaaanttttnc

SEQ ID NO: 775 - DNA, 1009 bp, Homo sapiens
  misc_feature (1)...(1009): n = A,T,C or G
agcnttttttngaanttcccctttnnttnaaaaatccccttttttggcaaaaaattncccccntntntnanngtttttnngatncccacatncngnaatntncgggcncgggnnactgncnannggcncccttcgggggnccngtgntaagncnatncttgtntntanaaagntggnnntnttttncgatngngactattgncnacnctcttccntnttggcagngngtctgganggttgnggtngctcatntggntaanccnatcctggngaccaannggccgnggtgngcntgcaagctttgnccacntgggaaanccgnnagtggtngtctcanttgcntgntgggnncntgnccccatcttgnctgctgnanccttggggagcaggnnctnggtngtggtnctgcctgcttgctgctngttccccgggcatgcgtnnncannaagggncatgcntngggcaanaaggtgcgtggncancgtnngnatnnnnaggaccaccntgggtcgngaatcnntgggttncctgataggaaccntnaannnctgcngnttttattaaatgggannanangggtncanttcaaagccagtnnaatgcccttatggaanggngtgnatnacatancnnnntatgtgtcntanannangaaatcgttnnncaaatttnnacaanaatntttntaanaaagggtatttnantntnggtgaaanaacaangntttaaagtnaaatgnttntancanaattaantaaacnggtnttnatgattncttacnaaantaacnatncnnaagcatttacngcttanangtccncnngatactnncanaatatggnnnnaattntannanatngcgataatctngnananactntcatnnnnnatngtgtaatcantanntacntgatttnnntnaaatgaaaacatntgatncaagattaatncattanntatacnaaaatnttcanatantanatntacatataatggtttcnaataaacn

SEQ ID NO: 776 - DNA, 785 bp, Homo sapiens
  misc_feature (1)...(785): n = A,T,C or G
gnnnnnnnttcccctttctaatcncttgganntcgctctntntgnangatcccatngattcgaattcggcacgagagaaacacaggtgtcgtgaaaactacccctaaaagccaanatgggaaaggaaaagactcatatcaacattgtcgtcattggacacgtanattcnggcaagtccaccactactggccatctgatctataaatnnggtggnntcgacaaaagaaccattgaaaaatttganaaggaggctgctgagatgggaaagggctccttcaagtntgcctgggtcttggataaactgaaagctgagcgtgaacgtggtatcaccattgatatctccttgtggaaatttgagaccagcaagtactatgtgactatcattgatgccccaggacacagagactttatcaaaaacatgattacagggacatctcaggctgactgtgctgncctgattgttgctgctggtgtnggtgaatttgaagctggtatctncaagaatgggcanacccnaaagcatgcncttntggcntacacactgggtgtgaaacaactaattgtcggngttaacaaaatggattcacttgaccaccctanaggccngaagagatattgangaaattgttaaaggaagtcagcacttncattaagaaaattggcctacaaatccnnganacaataancatttgtgccaatttnngggttgggaatgggtgaccaacattgcttggagcccaagtgnttaacaatgccttnggttnaaagggantggaaaagttacc

SEQ ID NO: 777 - DNA, 1366 bp, Homo sapiens
  misc_feature (1)...(1366): n = A,T,C or G
ananaanannannnnnnnaaggnnaananannnnnannnnnaanangnaaanananannntnnanaannnaagnngnttcnanncttttcaaagcttggaaaacgcanncaannnnngggaaagcaagaaagaacagctaaagnnngncncagaganagcttttangangtntangaagaaggaatannngnggncaatannnnannnncngaaantatcatganacncaaatgangganaaggcagcacaagctgngcaaacagctatngngacgggggggccgggagagnctaaangncananatncaatatataaggactgcatgcnaagggatacnaaacaagnanactnntctaggaagaaataantnttgacntancnnacnttcataacgaatagcaccgtacatcgagncaaccaactaanaggnctaaggaaatggcaaannacnttaatnnntgagcnaaggaagggngtatngnccnananngaaatgcntcntaaccaanttttaatngtaacggnatnangatnaanncntnancccacgcaactcaaaaanattacattanntaaaaaaganctatancaaaactagtnttcaaaatngnacgagnaaatgggnaanantttntnnccgggaaaattggnagagatccanaaacactggntnagggnaatanatgnccgcccnaaaaaaccntnaccataggnatnggctancatagangagatatancnatnaggggatcaanancntaggnattngaaaantaancgagttaaaacancnagatnnggnantacgaganatagcttggacgngtatcaaatcggaccctnggatgggcntanggaaaaanaaaaaggntngagngaanttcctcanaggaanngtganagagcnaaanaanatnaagggccttggngaaaanggaaaaacagatagngtcatncnatatatncnnatgananantggggnaatntaatctacnntanatnngggggaaaaaaatcnnncatgacnnnaaaangagntaatgnnannatgagagattaaacnnataaaacnagagaantttgngnaaanctgngagataaaaaataaataaattctntntggaacatntanaccntctatnnaaaaaaaagaggggaaaccatctngattatgcacananaaatntnacntngnggaaataaatngggnacaataacatatatgnggatgtacantnntggncngaaaaactatacaacntgagannnnacnangatataaagcnnnaggnagtntatangggcatcatcaangggaagntataaagcaactgnannctcatatanaaaactgnncnncaa

SEQ ID NO: 778 - DNA, 775 bp, Homo sapiens
  misc_feature (1)...(775): n = A,T,C or G
gntttnnatncctctttctaatnncttggctactcgntctntctgnangatcccatcgattcgaattcggcacgagagattatgagcatgtagaagatgaaacttttcctcctttcccacctccagcctctccagagagacaagatggtgaaggaactgagcctgatgaagagtcaggaaatggagcacctgttcctgtacctcccgccgccgaacagttaaaagaaatatacccaagctggatgctcagagattaatttcagagagaggacttccagccttaaggcatgtatttgataaggcaaaattcaaaggtaaaggtcatgaggctgaagacttgaagatgctaatcagacacatggagcactgggcacataggctattccctaaactgcagtttgaggattttattgacagagttgaatacctgggaagtaaaaaggaagttcanacctgtttaaaacgaattcgacttgatctccctattttacatgaagatttttgttagcaataatgatgaagttgcggagaataatgaacatgatgtcncttctactgaattagatccctttctgacaaacttatctgaaagtgagatgtttgcttcttgagttaagtagaagcctaacagaaggagccaaccacaaagaattgagagaaatnaacaactgggccttnggaaagaaangcnggccaagctgcttgagtaatagtcagancctanggaaatgatntggttaatgaattcaccccaggncacacccngttgaagagc

SEQ ID NO: 779 - DNA, 781 bp, Homo sapiens
  misc_feature (1)...(781): n = A,T,C or G
gcttttnannnccctnctttcnaancctcttcaaatccttggntatcgttctntctgnnggatcccatcgattcgaattcggcacgagagacaaagaaaaaggtggcaatcatagaagagttagtagtaggttatgaaacctctctaaaaagctgccggttatttaaccccaatgatgatggaaaggaggaaccaccaaccacattactttgggtccnntnctacttggcacaacattatgacaaaattggtcagccatctattgctttggagtacataaatactgctattgaaagtacacctacattaatagaactctttctcgtgaaagctaaaatctataagcatgctggaaatattaaagaagctgcaaggtggatggatgaggcccaggccttggacacagcagacagatttatcaactccaaatgtgcaaaatacatgctaaaagccaacctgattaaagaagctgaagaaatgtgctcaaagtttacaagggaaggaacatcagcggtagagaatttgaatgaaatgcagtgcatgtggttccaaacagaatgtgcccaggcttataaagcaatgaataaatttggtgaagcacttaagaaatgtcatgagattgagagacattttataggaaatcactgatgaccagtttgactttcatacatactggatgaaggaagattacccttagatcatatgtggacttattnaaactatgaagatgtactttnacagcatncattttacttcaaggcagcaagaattgcttttagac

SEQ ID NO: 780 - DNA, 783 bp, Homo sapiens
  misc_feature (1)...(783): n = A,T,C or G
gnntttnnannnccngntttctaatnctnttcnaatnctttgnnancgttctntatgcangacccatcgattcgggaatctcctagaaaagttgtgattttcgagccatatccttctgtggtagatcctaatgatcctcanatgttggccttcaaccccaggaaaaagaactatgatcgagtaatgaaagcactggatagcataacttctatcagcnaaatgacacaagcaccatatctggaaatcaagaagcaaatggataaacaggacccccttgctcatcccttactgcaatgggttatatcaagtaatagatcacatattgtgaaactgccagttaacaggcaattgaagtttatgcatactccacatcagttccttcttctcagcagtccaccagccaaagaatccaattttagagctgctaaaaaactctttggaagcacctttgcatttcatggctcacacattgaaaactggcactccatcctgaggaatggtctggttgttgcttctaatacacgattgcagctccatggtgcaatgtatggaagtggaatctatcttagtccaatgtcaagcatatcatttggtactcagggatgaacaagaaacagaaggtgtcagccaaggacgagccagcttcaagcagtaaaagcagcaaatacatcacagtcacnggaaaaaaggacagcaatcccaattcctgccaaagccgtaacttaaaatgcatagnccttatgtgaaagggatcaccttcatctggacctgcacaaacatggc

SEQ ID NO: 781 - DNA, 796 bp, Homo sapiens
  misc_feature (1)...(796): n = A,T,C or G
gnnntncgccttcaatnctnttcantctnttcaatctttgaatcntctttgttgtccatcgttcaattcggacgagacccttatggcagatccccacagtctggggcagaagaggcgtcgaggngccagaagtgncggcagcagcagccgcagcagcccaaagagaggcaagagaaagagaaagcggccggtggaggggtnnncggaagagctggtccccgtggttgagctgggtccccgtggttgaattggaagaggccatagccccaggctcagaggcccagggcgcttgggtctggtggggacgcgggggttgcccccaatggtgcagctgcagcagtcaccactagggggtgatggagaggaagggggccaccccagggccattaacaaccagtactccttcgtgtgagccaaccccacccgctccaccctttttaaaccccccagcccttgctcgtgagattgggcttgggtagggacagaagaggcccgaaatccctcccccatgcttnctgacccttgtttggccaaagggcatctttgatggtacaaagcagangcttcggganaagcttccgtcacaacactncaaggtcccttcccaagggcaaggggatttnggcttcatgagctnctttgaggggcttttttttggtcannccccaccttnggggccatttttcccaattaacttacccccaaccccaagncanggttnagggggnaaagggctttcnanttccattaaagggggtttgtttgttgntgttttaaaccaaaatggggaaancnn

SEQ ID NO: 782 - DNA, 886 bp, Homo sapiens
  misc_feature (1)...(886): n = A,T,C or G
cggnnnnnnngnagcccntttggnaaangcctctaagggaaangcctttttgaaaacnanangaaaacctntgggaaaagnccncannnattttngngaaannggcnngagcnnanantnggacacngttntaannnnannagngnnngttttnngananagggnnnnnagnggnannnangngnnggagggaannaaggnanagnannnggnagnnaaggnnnnaaagaagnagnnanggaganggnnngnggnggggcatgangngggnncagaggcacgaggagcccaagaccatcacngangagnangagcagggnaccnacatnnacnnggacnacgagaagnggggccagcggaagaaggaaggnagnacctngagnaccgntaccaggaggancgggaccnacagngacanaggnccnnnncnanacggannnnanaaacgngaagcaggannnnnanggaccaagggaagggnncngnncnnggaaaganngggagggaggnncgaaggcaaagggggganncgnnannnccaggaagnanggaaggggggncgggaggnnaannganaagangaaccnngggggnncaggggggcgagggnagcanaannnnnccnnagncaanngaaggggananaagagngggaaaannaannagaaagagggaaaanaagnnaaggaaanaaaagangngnnaannnggganaaaananggngananngnngganaaangngnannanaaaanngaggaggncanngggnaaanaananggggagggnnganananagngaannagacaaggaanagngaannagngnanagnanngngnannaaaggnannggggnaanaagnannanannnnnagngaagan

SEQ ID NO: 783 - DNA, 805 bp, Homo sapiens
  misc_feature (1)...(805): n = A,T,C or G
cnaatncttgctcttgncctntttcnaatncttggcnactcgctttctntgcggatccctcnnganncnatcgttcgaattcggcacgagcacaaggagaagaaagttaattaacattgaaagatgagaagacatcttggaagacttgaattgggccttggaagaagaacagccattcaaatagatagaattgtggtagcaaaggcatacngntcggaaagtatagatctccagggacagtagtcatggggttggggcactgttggaatttaaggttggaaggatatattggagccccttgaatacggtaacaaggcacaccttgggcagtggagagttatcagagtgtttgaaaaggagggttattgagtaaataaatagactggtactttaggaattttaaaatgtggatcattgtactactaataactatntattttatatttactatctactaagtaatttacatgtattttcttgtactgactgtaaaccttctgggtgtgggtgttttaagtgccattttactgataaagaaactgangcttaaatagntgaaatanntcaccctgttagtgagtggcacaatgacaagtcannatcttanggttgccnanntccaaaanncatttaaanttnnagnatnattgannnttttnccttatggcntnnnaaatttggggagccattattgaaatccnttacnacntangaattgnccaaaaaaaatactttttggggaaaactggatttattaattatccaaaataatttnantggcttgnttggcttntttccactntnc

SEQ ID NO: 784 - DNA, 776 bp, Homo sapiens
  misc_feature (1)...(776): n = A,T,C or G
taatgctggttactgcccttcaaatccttgcaatcccttggnaancggnccngcngacccatcgattcgaattcggcacgaggttatattaaattattctttgntnttctttgtcttttaataaagcctgcaagttactaaattgnagttncataaattctgtagtnaagtatcatcttggcagngtgccaaaggtgaaaangntgcttnctctaacagagaaattcttagngactccagtcgtanaaaaacgtctttacaacctgaataagatngangaattgngaacataccatggcctattggatgaatcatttgccggnggctanancagactgtagggtttgtgatggatntatggagtatgtgggtatagaaatcatgaatntnccatttgnnnncagagattcaagcntanacttaatgggtagatcataaatgacagaatgaattcaaaacctagcacgtgcattgtaaatgtgtgcccagatatgtnttggaaatggcagntccttggggtcatgtntctactggcaaaatttgctatagngnnactattgnantgtaattataaaattnatcannattatncaccgattngccaagtaaactgtactgtncataggaattttgggaattgtgcanaaattggatcaattgaanttnagaacngatgtctgggcttaaaaatttatcngggaccacnnattangaaactnacatntttcggngctgaggttcattgnccaaggccangaaggtntttnccgaaaanc

SEQ ID NO: 785 - DNA, 778 bp, Homo sapiens
  misc_feature (1)...(778): n = A,T,C or G
ttngaaaacnccttngcttngttncccctacngaaacccttttgaaaaccntttgcnanntcctctttntgnaggatcccatcgattcgtgaaagaggagatcggtgacctgggctccttatgtgcctgaatgagtttgagtttcctgttaactccaaatcaacagtattttcaacaagaaatgtgcaattgaaatcaagtgctgtttaagtgcagctaggantccacaggaagacacttgcagtgaacagagttatggagcagcaaaaacacagatctatttggaaaaagagaaaacatatgcgttgtattttgcttcaattataaaataccatcctctcaaaggtggttctaaattacaaaggactttgatttctaggtagattctgggtagagacttcctttcatattgaggcattaatgacaccttttaacctgggaagcaatatgactggagttgtactttgagaagattaatcaggtttggttgcagaatgaaagagaagatgaagtcaagagattggtttagaggctctagcagaagcttagtcatatttcaaaatgatcaaatatcaagaaaaattctgagctgcataacttgtataaagtaattttcagtgatttttttcatggttatgataaaagaactggattagcagaaacttttaccctgaatcaagatttaatttttctttgagctcatcttaaggatatcggaacatagggagcaaacgatggtgtggctgcctcantgcttgaattttaacngttttgaaan

SEQ ID NO: 786 - DNA, 805 bp, Homo sapiens
  misc_feature (1)...(805): n = A,T,C or G
ngccccccctttcccccctnttgaaancccctttggnanannccnntttcaaatcncttgnaaatccttggcnactcgtnctntctgcaggatcccatcgattcgaattcggacgaggagaggatcacttgagcttaggagttcaaatccagcctgagccaacataacaagactttgtctctaaacaaaacagttattgtttaaagaatctgaaatcttcatctttaattcaggtagccgtgaatcgagcccaagtttgtttgatatccagttccaagtctggagagaggcatctttatcttattaaagtatcgagagacaaaatatcagacagcaatgaccaagagtcagcaaattgtgatgcaaaagggctatcaaagggaggctttttacagagaactaaggaagagaaggaggttgttaaagagacttgagatcagaaaaagatcaagaacaacttgaatctcaaagtatgaatttgaagtattttgctgagcaaacatttgaatgcctgtatgtaccgtaatcctctatcactggggtccccaaccccggtaccagcccgtggcctgctagggactgggccgcacagcaggaggtgagcagtgggtgggcaagcgaccattcccacctgagcttcccctcctgtcagatcagcagcagcgttagattctcataggagtgcaaaaccctattgtaaactgcccatgccaagggatctangttgcaacgcttccttatgagaanttgaatgcctganngaactgtcactgncttccatnaacccccagatgggtactngttc

SEQ ID NO: 787 - DNA, 775 bp, Homo sapiens
  misc_feature (1)...(775): n = A,T,C or G
ccttggnnagnngcccccttnaaancctttgaaaacccttggcaaangccctnncngnnngatcccatcgattcgaattcggacgaggagaggatcacttgagcttaggagttcaaatccagcctgagccaacataacaagactttgtctctaaacaaaacagttattgtttaaagaatctgaaatcttcatctttaattcaggtagcaccgactcgagcccaagtttgtttgatatccagttccaagtctggagagaggcatctntatcttattaaagtatcgagagacaaaatatcagacagcaatgaccaagagtcagcaaattgtgatgcaaaagggctatcaaagggaggctttttacagagaactaaggaagagaaggaggttgttaaagagacttgagatcagaaaaagatcaagaacaacttgaatctcaaagtatgaatttgaagtattttgctgagcaaacatttgaatgcctgtatgtaccgtaatcctctatcactggggtccccaaccccggtaccagcccgtggcctgctagggactgggcccgcacagcaggaggtgagcagngggtgggcaagccgaccattcccacctgagcttncccctcctgtcagatcagcancagcgttagattctcataggagtgcaaccctattgtaaactgccatgcnagggatctaggttgcacgctccttatgaggaattgaatgccctgatgaacttgncactgncttccatcacccccagaangganctggctaacc

SEQ ID NO: 788 - DNA, 774 bp, Homo sapiens
  misc_feature (1)...(774): n = A,T,C or G
gaaacccttttgtnaanagccncttcaacccnttctaatgcttggcaatcgctctntctgcangacccatcgattcgaattcggcacnagattatttccaaagcagcctacagtagaaaatagtcattatggcagcagcttctgatgtttttgtttggtaggttttctgatttcaatatatagaatcatattcatagagtatcttctntnccgcctngcacaaagtacccatttaaaatttacatgcacagttcattgccacctttcttaggcctatgcatagttaataaggttataatctactcaacatggaaaatggagcctatttgcaaacacacaagtaattaaagtaccaattctctcttagtttctttttttatagttggtttattttgcaattataaatgttaaacatccctagagatgaaagttaaaatggttgatcacagatcagtagcaaaatacaaattgacaattcaaaattataaataaaactctgttgaggatgtttaactttgagtctccaaatttaagagctaagcttggaagaaacaaatttataggttatatttccctcttaaattaaanaaacaaacttcctctggcagtagtttggtgaattcctttcattgnaatgataccatgattacaggatcaaaaatgcttaacttacttgccattctgctcacatcatcacaggttgttntttttttaaagcactcnatgtaggcattttaaaccttcnggataaccagagtatcttttgagaaannc

SEQ ID NO: 789 - DNA, 773 bp, Homo sapiens
  misc_feature (1)...(773): n = A,T,C or G
ngcccctttgaanccnacngaaatcctttggcnantcncnctntctgtnggatcccatcgattcgaattcggcacgagagcagatttgngataaacntnntgnaggttnaaccnaaggggaactnntggtgcaactatgnngnttggaagatgctgcntatgtttattgaggattgcannanananatcctgaatnctcgccntttncaaaggcttggataaagcactcaagccagctacatatgtatagaacggnttaaaatcnatgaggaagcctggactaaatatnccatnggactggngccnanaangctgncgatgaactttgnatctggnnagaagtntaaagaatggcaggatnantnnctaangatgaatttcannacnggnnnnccaccantcttnaatnctttaagatcattatacgaagncnangaaaaggtggcaatcatngaanaatgngnatnatgttangaaacctctctaaaaagntgacggcactttaaccccnatgatgatgggaaggaggnaccaccaaccacattantttngggtccagtactacttggcacanccttatnacgaaactggncngtncntctattgctttgggagtaccntaaaatacngccntngngagtncacctncaatgaatnnaanctctttntcanganagctnnngatccatangacntgctgganatntttaaggaancttcnanggnggantggattaggcncaggccnttggacacanccntncttnatttnc

SEQ ID NO: 790 - DNA, 953 bp, Homo sapiens
  misc_feature (1)...(953): n = A,T,C or G
aanannnngggnnnnnnnnnnnnnannnnnnnnnnnnnannggngnnttnaaanccttntaanngncnntncngcttnaaaccttggnaancnccgcccnnttgcannaaangngaannnatgcttngtgaagcctgannccaaanctnaaggnanggacctggatccccttatatngaanaancggtntggaggaangagnntgtcngggaggatggggcagaaaatgangnnggcagantggncccgggggctctgcanaccagccttggagcctgctcattctgggcccttgctgccaaggancccagcctnacctagcangaaanganatgaaagcccttctcccangaggtagggtctaggctgcccnaacttaaatgcattnagaaanctcntagatgtggaaanatttttncgaacctgaaaatgcagctggtanaatntcaatgggaagcataaatncatgtaaaatataattnagntngaatatnanngtaaaaatgcacttttnngcggtgtgacngatcctgggnncccannatctgnnattnaagngntttacnaanggaanggaaaggacctttncctaaactacctttttgaacagancattaagaangnncnttcttttaagnaaaaaaaaatcaaattttgangaaaantggnattngaatgtnnagaaaaanggatananaanaaaanccaatnntaannaccnannctctctgganttcnactatctccactacntacntntacntatngcgntaanatnnactnttacntcnnnntantcncacanacntcntcnaacntaatnangcncncanaatcctctatannatntantgtnnntcacannncnnacnggntaantntnnncaacgccatatcaccnctnnnatcgncnagntanataacacntatatcgncactcncacananactcc

SEQ ID NO: 791 - DNA, 798 bp, Homo sapiens
  misc_feature (1)...(798): n = A,T,C or G
tggnancgcnctntntgtttgatcccatcgattcgaattcggcacgaggatcattgttaattagtgacatagtaacatctgtagcagctggttagtaaacctcatgtgggggtggggtgggggtgtattccttgggggatggtttgggccgaatggggagtggaatatttgcncttcncctgttttaaattctaggatagattttaacatcctttgcggtcccagtccaaggtangctggtgtcatagtcttctcactcctaatccatgaccactgtttttttcctatttatatcaccaggtagcctactgagttaatatttaagttgtcaatagataagtgtccctgttttgtggcataatataactgaatttcatgagaagatttattccaccangggtatttcannctttgaaaccaaatctgtgtatctaatactaacccaatctgtttggatgtggattttaaaaaaatgtttgctaaacctacccaaagtnagatttacctgnatttaaatggcctttngggtcttgaaaaagctttntnaacctcttggctttaaaatgcgttttattctngataagatacttcnaaatancctnncaaaaggtgttngatncnaattactttaaaataaaacctgtaattgnataatgncataatgntgntccatgcctnantccccttctagnnntanaaacntnantaanaantatatcaatnntcgatnaaatnntannactataaaaactncggccctcttananacttnatncttgaagttctcantataaccnc

SEQ ID NO: 792 - DNA, 788 bp, Homo sapiens
  misc_feature (1)...(788): n = A,T,C or G
ctnttgttctttttgcaggatccatcgattcgaattcggcacgaggcagagctcacatcctgtgcgcagcatcttctgtcccctcatgtccttccgccagggggcctgcgtggtgacgggcagtgaggacatgtgcgtgcacttctttgatgtggagcgggcggccaaggctgctgtcaacaagctgcagggccacagtgcacctgtgcttgatgtcagcttcaactgcgacgagagcctactggcctccagtgacgccagcggcatggtcatcgtctggaggcgggagcagaagtagggtcctgtcngccctgctgctgtcctccatcccacccctcttactccacctcgtgttgtaaataaagtttcggtggtcatgctganggccggctcccagctctgccggggacggacagggcagaaggcancgggcaacttcaggaacacggtgaaaaaaaaaaaaaaaaaactcgagcctctagaactatagtgagtcgtattacgtagatccagacatgataagatacattgatgagtttggacaaaccacaactagaatgcantgaaaaaaatgctttattttggggaaaatttgggatgctattgcttaatttgnnaaccattntaaacctgcaaattaaaccaagtttaacaaccaancaattggcanttcatttttaatggttttnaaggttcaaggggggaaggtttttgggaaggtttttttaaaattnncgggnccnnnggngcccaatgcatttggggccccgggnccccaaanttttttt

SEQ ID NO: 793 - DNA, 806 bp, Homo sapiens
  misc_feature (1)...(806): n = A,T,C or G
gaatccctttgcttctgtcctttaagnnatcgttggaacaaccatgnctttttgtaggtgaagtgttctctctgcatgcaacagtaaaaattaatataatatttttnccacaaaagaaacacttaacagaggcnagtgccaatttataaaatttatgatctaaagggggaaatcatggattataaagtccttcagccctttgggactctaaattggngggggattaaaaagaatttaaaataattttngaaccgaatttattttcccctcagtttttgagggcattaaaaaggcattaaatcaagacaaatcatgtgcttgagaaaaataaaattaatgaaaacncagcactttatgttggtttaacntgcancctnctttggaggtagaatttatttatttaaaattactgggtgcatcangaacccatagggtgtacaaaangttctattaaaatctgcnttatagagacaaagaggcaggcaaatccatgtnacaaagggtaaagcttacagtttacaaactgngaacgccanggtgtaggatataaaaacgcactcttgagaaaacanatggtcatcagggtgctgaaaacttgcatggtgcttttcaacattagcctttggtccacaaatttcttgtatttgacaggatccatagtgtgccatggggcaaganacnattttgccctctatggtnttctttaaaaattttcantttaaaaatacctcttttnncaggaatcctaattttggcnccgaagcntattnntggtnccacatttaccgttgcccttgccnttggan

SEQ ID NO: 794 - DNA, 815 bp, Homo sapiens
  misc_feature (1)...(815): n = A,T,C or G
tttcaaatnccttggctttanccctttgtttganntccttgttcgaattcggcacgaggccttctctggcctcaccaattaggtcaaatgttccttattttgtgttgtggggcatggctctncctgtgaggacctgtcccagcttggacctccgccttcctgcgactgtattggtgtctntccctctcaagcctatgagctcttgcaagggcagggaccctgtatgattttgcctatcgtatgtcctccagcccccagcacangcgcctggtgtccagtgagagctcagcaaatactttgtgagttaaangacangcgggcttggggtagatggatccgtctgcctanacagggcangttattcccgcttgtgagcaactcttaanagaaacttcattttttttcggcgcctgcncgaactttcaaagatgtttcccggccangaacngtggctcacacctgtaatcccagcactttgggaggcttgaagtgggtngatcaccttgaggtcangantttntagaccagnctggccaacaccggtgaaaccccgtcctctnctaaaaatacaaaanttaactgggtgtngttggtngggcgctttgnantctcactacttnggaangctgangcnatgaanaatttgcttnaaccccngganggcngaagtttcaattgangtcnanacttnancccatttgcgccttcanaccctggggcaacangtatcannaacttnaacnattaaaaaatnaanananctcttatccctttannaacnattattgangntacntattntcntagaaatccct

SEQ ID NO: 795 - DNA, 1050 bp, Homo sapiens
  misc_feature (1)...(1050): n = A,T,C or G
tttctaatgcttggctttgagncctctntttaaaatcctttggcnactactctgcacgatgcggcgctgacccggncggncccacacccgctctttnctcttctttgccgcggactccctttcctgcctccaagacctgggtgtctacaactgtgagcccagcttgnnccaaaggcagtccccatgggacctagactcaccttncccttgcctctatgaaaccttctgcttgggcccancccctgttccagctcccgacctgcacttccttgctgggactcangcctccaagctccctgcccagcnagcggncttcagccaccgtcttcccctttctttcgggccctgnttgtnagcanctttgcagaaacccanangggacctngtgccccttgcnaagnctgtcgccttggtgcaagactgncctgtnctgcatcattttncatggttgncgggggtgtggggntnnncnngncgnnncntgntcacaatcaancatntatncctnanntngggtatnacnaatggcctnaagantgctacntcntannnnnganttntcangnnntnttactaacntncnatngnncntnganatagncatgnantnttagtntntgatntanccncnattgcagccncataattatcctacaccacanannaanccntccttnnagaanntgncntctatgnaanagnctnnnaatgtggcnncnaatataanntnntntnctnncatcntannnnnntcctacgtnannnnncatnnncnctntnggnnactatcncatantacatcnntnannncacccatnctnntntnanatntctcntgggnantnnnntctcctnnanatncnctaatnangatctctcanntacatganntanatnacnnatanngnnnanatcnannnngtctctcntatnnnttatnnanngntcannttacnnnannannnaanngtatnntngttcnaaanntatntataaancnncgtnnntttnnannagatgtacnccnntnanntaannatctangctccg

SEQ ID NO: 796 - DNA, 884 bp, Homo sapiens
  misc_feature (1)...(884): n = A,T,C or G
ggnnntttngagctcggaaatcncttnggtnnagcctttcnttgaccccattgttcgaattcggcacgagacggcctggtggagcagctgtncgacctttncctggagttcctgcacagccaggcacactgcatcggcttcccggacctggggctgcctgtggtcctgcagntgaagtcgttcctccgggagtgcaaggtggccaactactgccggcaggtgcagcagctgcttgggaaggttcaggagaactcggcatacatntgcaagccgccgccagagggttnccttnggcgtttctgagcagcaggcagtggaagcctggganaagctgacccgggaagaggggacacccttgaccttgtcctacagccacttggcgcaagcttgcgttgaccggggaagatccaacttgggagatcaanngggcaaaagaaccggcttggaaagacctggaactttcccttgagatcaaaaccgaaanggaagaatgggcttgacanggaanggatgaaggacagggaagccaattttaaaagaccctctttgacctgnacaagctcttgaaaaaggacgacacccgaggggattcttcggagannagggatactgangccccctgagcacctcggcatgggggtngggaagaccattgnaaacaaggaccaaggaaggaagggccnaaggaagggacaagcanncaaactcggaanggntgnaatgggnccttngggantnggaggaaccccanaaccccaaaaaggccggggggcttgggcccccttggggggaancttnncaacaaaatntgggccccaagggggccccggaaaggaacgaaaccttggaagggaatcttgncaagcttcttanaaaagggancg

SEQ ID NO: 797 - DNA, 773 bp, Homo sapiens
  misc_feature (1)...(773): n = A,T,C or G
taatgcttggctctgtctnttgttgacccntngttcgtttgtgcctgagcacccacaatttcaggatttagactgtgtgggcacctcagctttcctctggntgtaaccactccttggtganagagggaactcctaaccantcccatttgncaaaggctaggcaatcttcattctgcttggctttagtcattcttgtcattgggctgcagaagaaaaacaactttgctgggtgatcccactgccttgatttcacctcggancgaggctgggccatgtccaagtcttatgaggtcaccctgactagaaaaaattgaactcacctacaaatagtctgaaagagtggtgtatatcaaatacgtgggtagtgttgcatttcaaatgangctcttctgggttgaaatgatatatttataaaaccagaatatcaaaaatgggtgatgtataatgtctctttagtttttttggtatttggcctcttttaaagcctgtcngatgtatgggagaaaaacaatgaaccgtgctttgatttcctatcaagtcactcttaagaacatacatattggttaaagtaactcggtctttttttatctgattctttgaggcactatgggtagcaaaataaccacttacaaatttaaatgtaatatacacttcttttctgngtgtcaagtccttatttttangtgcctaattggacattttaaaaggttaaattattnggttggcatattaatntcaaaaaatctattaattnattttaatgcctggtaccg

SEQ ID NO: 798 - DNA, 812 bp, Homo sapiens
  misc_feature (1)...(812): n = A,T,C or G
gtcaatnctnttcatgaccctatcgattcgaattcggcacgaggctggagcacgctggagaggccatccctgccctggcagcccgcggctgggggagactcctttgccccattctttgccggtttcctgccattattggtgtgcaagacaaaacagggctgcacagtggcagagaagtcctttgcagtggggaccttggcagagactattcagggcctgggtgctgcctcagcccagtttgtgtctcggctgctccctgtgctgttgagcaccgcccaagaggcagaccccgaggtgcgaagcaatgccatcttcgggatgggcgtgctggcagagcatgggggccaccctgcccaggaacactttcccaagctgctggggctcctttttcccctctggcgcgggagcgacatgatcgtgtccgtgacaacatctgtggggcacttgcccgctgttgatggccantcccaccaggaaaccagaccccaagtgctggctgcctactgcatgccctgncactgaaaggaggaacttgnaagaatgggtcaccatttgggcgcctttttaactttctgtaccagancaaccccttgacaaggttataaaatgtnggctccccgaaccttnttgcgtattcttgcagncctcaattcttggcttgaccaaccaaaggattcccacccangaaaacccnaangggcccnaaacttgttnncttgnttnccttggaccgtttccttggggccaaaaacaggnanaacccggacanggttttttnaaaccagntttttggggctttaaattggccttgg

SEQ ID NO: 799 - DNA, 758 bp, Homo sapiens
  misc_feature (1)...(758): n = A,T,C or G
ctaatagcttttcattcnaatgcttgtgatccctcgattcgaattccgttgctgtcggacagattgccctagtacccacccacctatcagggttatgcaatggaacatcctcgcccaagctcttggagaaggcaaagacaactttgtacagtgccctgttgaagcactcaaatgggaagaaaggaaatgtctcatcctggaagaaatcctggcctaccagcctgatatattgtgcctccaagaggtggaccactattttgacaccttccagccactcctcagtagactaggctatcaaggcacgtttttccccaaaccctggtcaccttgtctagatgtagaacacaacaatggaccagatggttgtgccttattttttcttcaaaaccgattcaagctagtcaacagtgccaatattaggctgacagccatgacattgaaaaccaaccaggtggccattgcacagaccctggagtgcaaggagtcaggccgacagttctgcatcgctgttacccatctaaaagcacgcactggctgggaagcggtttcgatcagcttaaggcttgtggactcttcagaacctgcaaaacatnacccaaggagcccaagattncccttattgtgtgtggggacttcaatgcanaccaacagaanaaggtctncaaacactttgcttcttncagnctnaaccttganagncggcctacaagntgctgaatgcttgatgggcaatttagaacccccatacacctacctgg

SEQ ID NO: 800 - DNA, 770 bp, Homo sapiens
  misc_feature (1)...(770): n = A,T,C or G
ttnaaancngcnttggactccttgcaggatcccatcgattcgtttaaactgagctccaaatgacgttcaaacacccctctcgggtagagttttcatggtggaacggttgcgcccaccaaacagaagcttatgtttttggcacagaagcctgggccattttcatggacacctggctggacctcggtggaagtgaactccgtaggttgttgcgttcactgcagcacctcacatgataccgtcccctctcatggaacggagcctcccccatgcagcccccactcaaatggagttttaaaggctgggttcaggttacgggggcgtttctcaccgtctgaatgcggaggacagagacnagctccagggagcgtgggcgggtgacggcgctgagatgcgtgatgtctcggaaacgtcctcgcatccctcancgcgggcgctgactgccgcggcccttgcctgtcttcaggagcgctccagcttcgcccacacaccccgggctgatgtcccctcgctccggcggcctgcagaccccanagtgcctgtctcgggagggctccccattcacacgaccctgagtttgggtccaagttagcttctgtcccaaagtaccngtattcccaaagcgcacccggtaaagganccgggccggnccttntttgcggggccgggggccggggccgggaactcgtngggggttgccnggaanggggttaaccgtnccggttnttccgnccttncgtgcaaggcttnccccgttaagnggcccaaaccnt

SEQ ID NO: 801 - DNA, 573 bp, Homo sapiens
ggagccctagagctccacaacaggactcagagcctctaaccagttccagcactccagactccagccacactccaacacagcaccatgatcccagccacccgctcgcttctctgtgcagcgctgctgctgctggccaccagccgcctggccacaggtaggtctcgccactgccactgggggaggagggacctctggtgagcgcagcctcccacagtcccgctgaccaagagtcttctcccatagggcgcctatcgccaatgagctgcgctgtcagtgcctgcagaccatggctgggattcacctcaagaacatccagagcttgaaggtgttgccctcagggccccactgcacccaaaccgaagtcatgtgagtatcttcccggttagcttctgccacttccagactcgcccaaaccctcccgcgcccccacacttctcctagtgggaatgcctaacatgtgggtctatccttctctctgcagagccacactcaagaatggtcgcgaggcttgccttgaccctgaagctcccttggttcagaaaattgtccaaaagatgctaaagtgagttgtga

SEQ ID NO: 802 - DNA, 1390 bp, Homo sapiens
ttttttttttcacaaggaatatcattttattactgtaatcacaaaatcgtaatttctgtacaggaatgtataagtgaacattattcaaagcattggtaattcacttcataaagagggtaaacatactacagaacatattgtaaagaaaaaatattgtaaaattttctggtcttgcagtgcactatttagtgcaagtatttaagacacaatagtgttcaattcagcaaagtattgcagaatgtcatgccacagtccacttaattcaaagagggtcaggacatgcagcttgtaataaaatgtcagagtgtgtgtgtgtgtgtgtgtgtgtatataaaaccacatgtaattcataaaatatatagtggtttatttagatggttttaaatgatttcactgtggaatccagcataactggaacaacatccaaggtcttcttaacggcaacaatcttattgctaggcaatggcyttggcttcaggtargaatgcytcccagtattttatcagctgttgttgtgtttgaactagtgattctaagtacttgatgataacggttttaaaatccttcactcgttctttctcaaatcttcccacttcttttcgaatcgttttagatatctgttcaaaatctctttccccttgttgcactttcgcctcccactctcttatttcatttttagcttgctgtattttatctggtttgttagcaaccatcatttttgcttcagcttcacgttttttgagcaaagtaatttgagcatcttcccatttctgccagcacttcattcgatggtcaaacacacctttcactgcagcaataagacgaatgtagtcactaagtagttctgaaaacatataaaagtcagmaaaagcttgttcttgatgtaactggtctatcttctcctcaacctctgcaagctgagacaaagctctagataaagcagtatgatcctcagaattacctaacatggcagcacttttagcaaaggcagctgtgttggctgaaagttcttttctatgacagamcaaggcttcaacactgacatgaagtttcctaagttgctgatccagattctcaaattgctgctgcttttcttcaaaccatgcatccgattcattcatcttgattgtcattttgttgacagcgtcggcagccttgttcaccatcctcaatattcctgctccactcagagcctgtgtattaactgctctaggcagctctgaactttccaagaactgccttaaatcaggatcctgtagtaaagttggatgttttactgttctttgaagatacctttcaagagctgctctccgtttttctacaaactcagtggatgatgagtcttctttacccactttgaccttggtcatccctactatactcttttctg

SEQ ID NO: 803 - DNA, 947 bp, Homo sapiens
  misc_feature (1)...(947): n = A,T,C or G
ggaacttctgagtaattggtatcatttcctagtgactcggctcttgtactccaatcccacagtaaaacccattgatctgcactactatgcccagtccagcctggacmtkykkcwsgsaggngagagcagcccagaacccctggacaacatcttgttggcagcctttgagtttgacatccatcaagtaatcaaagagtgcagcatcgccctgagcaactggtggtttgtggcccacctgacagacctgctggaccactgcaagctcctccagtcacacaacctctatttcggttccaacatgagagagttcctcctgctggagtacgcctcgggactgtttgctcatcccagcctgtggcagctgggggtcgattactttgattactgccccgagctgggccgagtctccctggagctgcacattgagcggatacctctgaacaccgagcagaaagccctgaaggtgctgcggatctgtgagcagcggcagatgactgaacaagttcgcagcatttgtaagatcttagccatgaaagccgtccgcaacaatcgcctgggttctgccctctcttggagcatccgtgctaaggatgccgcctttgccacgctcgtgtcagacaggttcctcagggattactgtgagcgaggctgcttttctgatttggatctcattgacaacctggggccagccatgatgctcagtgaccgactgacattcctgggaaagtatcgcgagttccaccgtatgtacggggagaagcgttttgccgacgcagcttctctccttctgtccttgatgacgtctcggattgcccctcggtctttctggatgactctgctgacagacgccttgccccttttggaacagaaacaggtgattttctcagcagaacagacttatgagttgatgcggtgtctggaggacttgacgtcaagaagacctgtgc

SEQ ID NO: 804 - DNA, 532 bp, Homo sapiens
  misc_feature (1)...(532): n = A,T,C or G
cctctgccctcccaggttcaagccattttcctgcctcagcctcccgagntagactgggactgcaggtgcgcatcaccacgcctggntaatttttgtattttgagtagagatggggtttcaccatgttggccaggctggtntcgaactcctggccctcaagtgatccacccacctcagcctcccaaagtacagggnttataggcgtgcgccantntgcccggccgagaacaatttntcacaagnttacttttctagttttgccaatgcatggtgaaagtgaacccaagcctgggaactgcaggcctagacaatgcaggrmmykksttsammcwsrsmsrmrsmsstysmarywmrsssagmcttggaaaggagaagtgtgaggcaggtgtgggtaggacctctttttagtacctagaaaaaggctaagaaagtggcctggagatgtttagaaggttaaaaccaacgaagaaaaaaatcaatgacaacctatcaggaacgtgattgactctcagaatggagaactggcgaatcg

SEQ ID NO: 805 - DNA, 552 bp, Homo sapiens
  misc_feature (1)...(552): n = A,T,C or G
aatgcattnttgattttttattgcagatgatgaaaaagttttagatatagacagtgccgatggttacacaatgttgtaaatgtatttaatcccacttacgaatgattaaaatgataaatcttatgtttatttcatcactaccaaaaggctgtgggtgcaggggtgctggtttctggtcctagcctaagagactggcagtttccaccttctatctcttgggacagtagctctgggagccctgagctgtcatgcaggaagtccagctaccctgagaccaccatgctggaaaggccacagggaggagctctgtggacagtcccagctgaaccttgccttccagctgtccctgtcaagatgccaggsatgtgagtaaagccatcatggaccctytagaccagactgcccaccagcagggtaccwtctggcagccacatggagcagaagaaccgcccagctgagccacttccaaactcttgacccactaagtcatgatccacaatgaacccatcatagggatggttggctttgcagtgtggataatgaggatgtcat

SEQ ID NO: 806 - DNA, 1646 bp, Homo sapiens
  misc_feature (1)...(1646): n = A,T,C or G
aactagtatatttacaacatcagaaacttcaatatggagatttgttgttcctatatcatgatctttagcagcaactacaccataggcactgcacaacctgggtcctagatcaggacgtacaaaaaatcctggcaaatgagaggccaaattgaattttccttctggattacaatattctggcaatggcagactttttaaaagatcttcgtatcttgctggcatcatagtcttgaagtcttctcctgaaggccaatctttcaattttaaaacaactgtttctccactcttgtttttctgccgttttgaaacttcttcaaaaccatcccagaattccttaacattggcatttgaaatgatgctatctttgcagttcaggagatcagcttggtggtctccaaaatcaagactaattgattccgccttccataggctaatgttcattttcttatgcacaccagaaaccactgcaggctgtccttgtttccaacattctttgaaaagcttccaattactgctattcttataatccttaagccataaaatatgcttctcacagatccaagaatgtggtatatcactgtataatttattattttcatccactgcagatattatgctttcttcaggctcttctttaagctctggttttacatttatcttggaggttttacttggtggaattttgttttcaacaactgaagcaattatgtcatcaagaatgttaggcatagtccgtccacttttgctacttggggctcccattgaatatactggggcaaaggcaatgccagcatctgtasaccccacacgtagctttccagctgttgtagtcagcaaatcccgtaaggttgagccttgttcattattctgggacacaagaggtgatgttctgccatttggagattcagagttgtcttgttctctttcttctttaatttggttttcaagggtaagttctttgttttcttttttttcctctctggctttttgctctgcaagatctgctaaccagtgcagtggtgactgggattctggaggagttaacttgttatctgtgcctacatcactctctgggctgctgccaccatttttctcagacttcggaggagtattttgctgctgagactcaggcatgcacagagaaattttattactgtgattaagaacattctgtaaaacttgagatacaccattcattgtaggaaaatttccaacttgtaaattctgtttgttagtacaatgacaatgggatttaataccatatttttccctaagagtgtgcatggcatctagaagatctgtcaaaacagaaccaggtataatttgggttggcattaaatgtttgtgatcatgaggctgtccyttcacacacttcatccaagcatattagttctttatccctagramyyctycctttcctttngccttgtaacaatctaagcaganccacaawkccacattttkggcagacccagtnrawkktaancawkgntgcttcacatgcatcacacatctcccggactcctctcactgctcttttccaggcaattttggcatcctttttcacccaggacaaagctgttttttcagatgttactaattgacagaacttatcacctattatatccaagatatatttagaagtc

SEQ ID NO: 807 - DNA, 1029 bp, Homo sapiens
  misc_feature (1)...(1029): n = A,T,C or G
tggggctgtgactgtatttacttcattcttgaatcccgcgtccccgtggctgggggctgacacatccctgggcaccactgtgacttcctgtgggtcccttcccttctgtccctgactctgtagaccccccacaggaagggtcctaggtagggggaggttcctcctcccttgaaaccctgggccactctgtcaaggcaaagctctgggcccagcaccttgtaaaggctttgatgagaggagctctggcttttgctcagggcctttggaccccaccctccagcccccaggaatgcaggcgctcaaagcctgtggtnaggctgcccgaagcacgtgccgcagttcttctggagtgggagcagggggacagagctttgggtagaggagggtcacctgcaaagctggaatgccaggggagtgggcggtgcctccagctcctgggggccagggtgtctccatacctcatgggcctgagcctgggcaggggtctggagtgcacatagcccccaggcagggagagggcagtgacaggacagagccactcatctgtcccaaagctgcaccaaggggtgtcagcaaccccaacctactgacctactttgggaccacaggcccatctagtgcaaatgaggcccagaaaggagaaatgctttgctcaacagccacagtaggctgacgtaacctatgtaatgtagggtcagggtgggcctgagggatganccaggtggtgggcaggtganacaccaggtcccctcctggcctctgccccacccagccctctcctgcacggctaccagaagatgtccgggaagaacanactagccctgagtagggagtgtggtcaggtgcagaggagggcaggggcccggatcctggcccagaaacactctaaaacagaatccgatcctgagatgatccaaatcaaacagaatacttgacggaaatagtagagtctgaaaatgatgcactctgcgcacacatatacaagacacacacacacacacgaatccacgcacacgaggcacaccccac

SEQ ID NO: 808 - DNA, 836 bp, Homo sapiens
  misc_feature (1)...(836): n = A,T,C or G
aaaaccgggtataacactttaatatagatttgtggaactctggcccttgcagccagaatacacatttataagccataaataaagcacgcagaaaccataaattaatcggacccgagacctggatttcaccgtgtcaagattgggaatgctttttttttctttttcttggtcatttacaacagacccttacattattttttttcctgtttttaaacaatagtacaaccctctggttctgttaaaactacatggttttacaccgagtcactcacaaaatttttttttttttttaagtaagacttccctgcaacaacagcaatggaggagaacaacaacaacaaaaaaatcagaatctgcaggtgcttgaagaagcaggagtctacacagtagtggaaaccggaggcttttttttaactttatattctttcccgttttcctccttatatagaacgtggggtatctgtgtggccctctgtttgggacggaacrgctgcagcgggtgaaggaagactgctgtcttgggggtgttggggtgggggtgttatggatttcttctcccttgcgtctctgcaacaccgtctccccaaagtctcgacccccacttgctctctcacttrtcctcgatccggggtgccagagttagccnggcctgaagccgtcgtcttcttaagaggagttcataatgggccgggagtacaccccctggtagtaggaggtatctgcggccaggggcgaggcgtccaggcccgttttgttcgtgaccgggcccatggccaagctgccaggcatgggggaaccgtagccggggtagtgcatcacctgttcgtaggccttga

SEQ ID NO: 809 - DNA, 1844 bp, Homo sapiens
atcaggtgttcctcccatggcaggagggaagaaacccagcaaacggccagcctgggacttaaagggtcagttatgtgacctaaatgcagaactaaaacggtgccgtgagaggactcaaacgttggaccaagagaaccagcagcttcaggaccagctcagagatgcccagcagcaggtcaaggccctggggacagagcgcacaacactggaggggcatttagccaaggtacaggcccaggctgagcagggccaacaggagctgaagaacttgcgtgcttgtgtcctggagctggaagagcggctgagcacgccaggagggcttggtgcaagagcttcagaaaaaacaggtggaattgcaggaagaacggaggggactgatgtcccaactagaggagaaggagaggaggctgcaacatcagaagcagccctgtcaagcagccaagcagaagtggcatctctgcggcaggagactgtggcccaggcagccttactgactgagcgggaagaacgtcttcatgggctagaaatggagcgccggcgactgcacaaccagctgcaggaactcaagggcaacatccgtgtattctgccgggtccgccctgtcctgccgggggagcccactccaccccctggcctcctcctgtttccctctggccctggtgggccctctgatcctccaacccgccttagcctctcccggtctgacgagcggcgtgggaccctgagtggggcaccagctcccccaactcgccatgatttttcctttgaccgggtattcccaccaggaagtggacaggatgaagtgtttgaagagattgccatgcttgtccagtcagccctggatggctatccagtatgcatctttgcctatggccagacaggcagtggcaagaccttcacaatggagggtgggcctgggggagacccccagttggaggggctgatccctcgggccctgcggcacctcttctctgtggctcaggagctgagtggtcagggctggacctacagctttgtagcaagctacgtagagatctacaatgagactgtccgggacctgctggccactggaacccggaagggtcaagggggcgagtgtgagattcgccgtgcagggccagggagtgaggagctcactgtcaccaatgctcgatatgtccctgtctcctgtgagaaagaagtggacgccctgcttcatctggcccgccagaatcgggctgtggcccgcacagcccagaatgaacggtcatcacgcagccacagtgtattccagctacagatttctggggagcactccagccgaggcctgcagtgtggggcccccctcagtcttgtggacctggccgggagtgagcgacttgaccccggcttagccctcggccccggggagcgggaacgcttcgggaaacacaggccattaacagcagcctgtccacgctggggctggttatcatggccctgagcaacaaggagtcccacgtgccttaccggaacagcaaactgacctacctgctgcagaactctctgggtggtagtgytaagatgctcatgtttgtgaacatttytccaytggaagagaacgtytccgagtccctcaactctctacgctttgcctccaaggtgaaccagtgtgttattggtactgctcaggccaacaggaagtgaagacggatccagatctgtgtgtgtgtgtgtgtgtgtgtgtgtgtgtgtgtgtcctatgtctatgtatcgggtgaggggtgggagggttgctggagggtgctttattgggtggagggcaccatgtcccagggctatcaaataaagaatagtttggttttttttttaaataaaggttttat

SEQ ID NO: 810 - DNA, 489 bp, Homo sapiens
  misc_feature (1)...(489): n = A,T,C or G
gccccgctccatgagcagtgactccccagctcctcctggcaccagtccccagggctctcctgttggtakwwmmwgctwywywtsyysswmmywmmycgkgracctcragatctyyaccctaaaatarttctgttgaatttcaccctggcratgtaaaytgakagcttatcttcacagatgysrganaakrgmcmayycmycwkcaswcctswgncwmaystswrwcwratksmtkycykwkccctatttatgtaaaaatacagggtccctgagccagcctaaggcataagtgacttatccctcctccctgctcacatataaattgtgtatttagtgaaaggctgatcaaagrttcaaagratgttatttgttatctacctgtggacccagnaggtccccaattccagttatttccacctttccaggaccgggaccaatgtatatatgtaactggattggctgttctcgtgtgtttgttaaaatgtgtgg

SEQ ID NO: 811 - DNA, 471 bp, Homo sapiens
  misc_feature (1)...(471): n = A,T,C or G
gccctcagccacccccatccctgccccttctgagactcacagcacccctttccttcctctcctcccacctcctccctcagcccctcattctccttgggaatctgcagagggctctgggactcactgccggatgtgaaatccaggcgtcagctgtttcctaggcaagggcaggaaagtggtctccagcccttgctccactcatgcctgggggnctgggsyygagtggtatccctacctggcctccccctggcctctggcctccagcgctgggtttgtcgagtgagagagagagaggagcttgggttgcttccctgtccccgccccctctgtggcattgtccctcccactcttatttttctaccaattgctatttttccgaacaatccttgtagagtatgtaccatccaaaggcaggagggccctcggtggccggctctggttggagatggtacagttttattgtacaggtgc

SEQ ID NO: 812 - DNA, 579 bp, Homo sapiens
  misc_feature (1)...(579): n = A,T,C or G
cccaatgaatcaacatactttattagacccactaagtgccaggggaggggcctgtgcctangagccaggttacagggctcacccgtagattcagtctggtctctccccatcatgcctctcacttccagtctgggcttctaataggagggccccgacttcttccctcccagtcattctctcgaatggagaatctttcctcattccagggacaccaaggctcaggaaggggcctatccatcatcagtagagccagacaagctctcccatcggacgtcctgtggctgggcccagaaatgggtgccgctgcctgtgggactgcccttccgggaaggaccagggtgtcttcagtgctcttggcctgcacgtggnaggagagtaggcagatgtctggtgctctttaagctcaaaggcatcatggccctctckgnwgsarcrrrsrsakamragkymsssatcncagscagcscwnkarskstsgcanwsmwcattscasmtgcascmmcmggrrrsmkcsksywcmkmagnsktnmscmtsgsrgycagcgcagcgtagggtggcatcctcattgcagatgcagc

SEQ ID NO: 813 - DNA, 562 bp, Homo sapiens
  misc_feature (1)...(562): n = A,T,C or G
tttttttttttccagatgtaactcttgtcttttattccagcatctcccagagctccaatatgtacagactttatttatacacatataatatacaccatatatacttatttatagatattcacacaccagcccacacactcgcacacactcacacgcacacacccttccaggaggggcgtgtggctgccttggagtcccgctagscccaaacaagtgatactgggcttgccaggcagttgtgaggttttgtgttttttgcttttaaaaagaaggccatttcctccagatgtgtcctccctctccccaagccctaaaactcctccccaaaacactctgaaaaaaatttttttaaaacaagrggnttttcctttgctytggsccaagtagtttctngganagntccrggsccatccacaagnyccgtgcaggtcctagagcacgagagccgggcgtggccttggtcaggcctgcagctgtgccctctgaggggagaggggaggcgctatagcatcaagggcacctgccagatgaggagggtgctgtccgtctccccacacggggc

SEQ ID NO: 814 - DNA, 594 bp, Homo sapiens
  misc_feature (1)...(594): n = A,T,C or G
agcctcgcctgggccggcctgtggctcccattttcctttcagcgggacaaaggggacttgttaccaggccattttctggatggcctgtgagatctctgcccctccaagaccckccaaryctsmsyckgwcscmswgytsksmsmmwgmmtycwgcmsygssmrccntgssrryktswrkctggcaccaggctgnagnctccccaatcccagcccactttgctgtgtctctggcgggctgtcctccttggtgggagctgtcctgcacactgtaggatgcttaaaggtatccctkgcctccacccacccctagccagcagctcccagtcagacaacagccagawatgtctccagactctgcccagcctccccaggtagccaccctcgagacacgacctcagagtctctgtgtctcctagaagcctgacagagacccccagggcagtgggtgggtngcgggctagagacccttgcctgtntccgggaccctggcgccgctctcccctcctgtggatccctccggactaacagtgttcttagtnggcagangctggggcaccccttnggccctgncaggcatngccattggcgcangc

SEQ ID NO: 815 - DNA, 812 bp, Homo sapiens
  misc_feature (1)...(812): n = A,T,C or G
aaaaccgggtataacactttaatatagatttgtggaactctggcccttgcagccagaatacacatttataagccataaataaagcacgcagaaaccataaattaatcggacccgagacctggatttcaccgtgtcaagattgggaatgctttttttttctttttcttggtcatttacaacagacccttacattattttttttcctgtttttaaacaatagtacaaccctctggttctgttaaaactacatggttttacaccgagtcactcacaaaatttttttttttttttaagtaagacttccctgcaacaacagcaatggaggagaacaacaacaacaaaaaaatcagaatctgcaggtgcttgaagaagcaggagtctacacagtagtggaaaccggaggcttttttttaactttatattctttcccgttttcctccttatatagaacgtggggtatctgtgtggccctctgtttgggacggaacrgctgcagcgggtgaaggaagactgctgtcttgggggtgttggggtgggggtgttatggatttcttctcccttgcgtctctgcaacaccgtctccccaaagtctcgacccccacttgctctctcacttrtcctcgatccggggtgccagagttagccnggcctgaagccgtcgtcttcttaagaggagttcataatgggccgggagtacaccccctggtagtaggaggtatctgcggccaggggcgaggcgtccaggcccgttttgttcgtgaccgggcccatggccaagctgccaggcatgggggaaccgtagccggggtagt

SEQ ID NO: 816 - DNA, 999 bp, Homo sapiens
  misc_feature (1)...(999): n = A,T,C or G
aagccgccttctgagcctttngcctctgttgttcctcctgctgcctgtgagttttcatgtgtgcatttcggcttttgatcttgaagaagactttgccncactccttgcaggggaagatggtggtggggtctgtctcgccgctggtggtgctgtgagagggtgancnctttaccncnacagtacccactctgggtgccnccaggcttctgcttcccagagsgkrtrrmmmckmgggccttgctttgccccctgnaaaagctgccccctanccatagtatctcccaggcaaagatgccatgctcactgcaaactatggaatgaggtcagaacagaatcaaagtaacgcttgatgggaaaagttggccccaagaccccagtactaagagggtcgcctgcgtctcacacacacacactcacagcaagctttgggataaaaggcaaccgggatggttgacatctgaatgcaatggaacatgaaggtcagcttcagtccctactgggaatgatttcatgagaaggtagcccagatgaaacacctcttaaagatagttgtgccaattatttattcccccaaccccccacaaaaacaaatttttttaaataaaaggaaaagaaataggatttttttttctaaacctgaataaaatgaccacttttaaaacagrtagtttaaaagggttacaaaacaagcaggcagtccaggtttcctgattaatgaagatggaggccgtgggttttcactgtctctaagtgacacacagggctttatagttctgcgtcaccctgaagcaagactgaatcttgatcatccaagagaagatcggtgtccacaacttcagcctcttccatgacacctcccaactgctggacgacgtcgtcgtcgaggatgtccacatccttgtatgggtttgatcagactcagctggtccaggggcagcagcmcgrcagcaccccacgggcccgtagtcctctcaatcgtggctgccatctcagctgcaa

SEQ ID NO: 817 - DNA, 653 bp, Homo sapiens
atttttaywtttaaaacattttatgagggataaaatatagtctttttctatcagtatgttcacacttcctggcctctcattgggaagctgtaagatgtccttcaataagatcctgaacacgcgacagaataatctcattagagctgctgcaattttctggaccatatggtgggtctatagtcaggaccccagccacacagagagtccttggagcgtctccctgttcagtgatggggatgtggttcttctcaagccatttctttaggctgttctttctctcttccagatcctctgggctgtatgctttgcagtctccagacgtgaacaaatgcatcagcttctccctcactctatggtccccttcattcatagtttcaacagtckgcacagcatgtcccataattccggtcacagacatgctgccatcttcaaggaagttcacaaggacaatattggcagagactgggtctgkagttaaamcccatcctttatactcattcttctcactggctgtcactcggacctctttgtaaatgtaatcttgccattctaaggggcctttcttcatccattcactcatgattgccacctggctaaatcagttaaaaaactcctcgcaactctgggtactcagcaaccatgctttgaggaag

SEQ ID NO: 818 - DNA, 1225 bp, Homo sapiens
  misc_feature (1)...(1225): n = A,T,C or G
ggattctttcactgagcacaaagagttgttggggctttagcatctgactgattttgttacggggttgattctgaccataggaagtatgcaatgtgaatcactatttacagagaaacctacaacagatgcttgatgttgtagaaactgggacatatagataccaagcaaaattataagaaacctataaggtgttcaatacgcttgtgtttccaaaattcactgtacatgatcagtttggtgttcttgtaccacagtttttaactgaaggaaccagttgtaacagtctcaattttaactaaaacttgaagaactaaaacaacaatgcaaacctttcagcattgtttggccaaacttgttaaaactgtaatgcaagaaccaaatgcactgtgatgtggcaccaactaattagcaagcatgaatttttcacccaagagtgaaaaaaggaaaatctaccatggcttgaagttaaagagcagaactcctgactaccattctatgactgatcaaaagactaatagttaaaaacctcagcaggccttgttcacgatatgcagaaaaaaaagtgctgcagtttagatacctctggaatttttccacagtgtcacaggtttgtaatacttgaagccctacatttctaagaatatatttcttgctcagttgtttcakgcaagcccaagactttgtaatttttaaagggcccaagatttttttttttttttttttttcaaataacagaccagcttctttttcttgcagttacagatgtaatttcctttttgttgtcaaacataaggtaccaaatatgatgcaataaattgttttgaaaaacagttgtgtgaatatttcaactaatctgtgttgggcttctgtgaaatacacaggtggaaacagaggtgcaagccagagcaatngtaatatgctgtaaggctagtgcagatgggagctttttagaaggggctaagtgctggtgtcagggaaattccataatgaagtagaatgctgctcctgcattaagatttcattgagggcaaggctggtggcaggtactatgaatgtaattcataatttaaaaggaaaactaaaaactattttgatttgggaaaatgagccttaatttgttaaacctatacactgaggaactagcctcaggctttaatattctcattggcatttgccaaggtcctgaggccaaataaggtttaagttaaaacaaatccaattgtnt

SEQ ID NO: 819 - DNA, 1024 bp, Homo sapiens
  misc_feature (1)...(1024): n = A,T,C or G
gacaccccagatgcagccaccaccagcagaagcgatcagctgaccccacaagggcacgtggctgtggccgtgggctcaggtggcagctatggagccgaggatgaggtggaggaggagagtgacarggccgcgctcctgcaggagcagcagcagcagcagcagccgggattctggaccttcagctactatcagagcttctttgacgtggacacctcacaggtcctggaccggatcaaaggctcactgctgccccggcctggccacaactttgtgcggcaccatctgcggaatcggccggatctgtatggccccttctggatctgtgccacgttggcctttgtcctggccgtcactggcaacctgacgmtggtgctggcccagaggagggacccctccatccactacagcccccagttccacaaggtgaccgtggcaggcatcagcatctactgctatrcgtggctggtgcccctggccctgtggggcttcctgcggtggcgcaagggtgtccaggagcgcatggggccctacaccttcctggagactgtgtgcatctacggctactccctctttgtcttcatccccatggtggtcctgtggctcattccctgtgcctntggctacagtggctctttgggggcgctggccctgggcctgtncaaccaccgggctggtaatcaccctctggcccgtggtccgtgaggacaccaggctggtggccacagtgctgctgtccgtggtcgtgctgcnccacgccctcctggccatgggctgtaagttgtacttcttccagtcgctgcctcnggagnacgtggctcctccaccccaaatcanatctctgccctcaaacatcgcgctgtcccctaccttgccgcagtccctggccccctcctaggaaggnccgggtcccacaggcaacacctaagtggaccaacccctctgcctgtcctgccccccagacgatgactgaaggctcctttgacaccttgagatgantctgctactttccagacttttcttacaa

SEQ ID NO: 820 - DNA, 631 bp, Homo sapiens
atttttaywtttaaaacattttatgagggataaaatatagtctttttctatcagtatgttcacacttcctggcctctcattgggaagctgtaagatgtccttcaataagatcctgaacacgcgacagaataatctcattagagctgctgcaattttctggaccatatggtgggtctatagtcaggaccccagccacacagagagtccttggagcgtctccctgttcagtgatggggatgtggttcttctcaagccatttctttaggctgttctttctctcttccagatcctctgggctgtatgctttgcagtctccagacgtgaacaaatgcatcagcttctccctcactctatggtccccttcattcatagtttcaacagtckgcacagcatgtcccataattccggtcacagacatgctgccatcttcaaggaagttcacaaggacaatattggcagagactgggtctgkagttaaamcccatcctttatactcattcttctcactggctgtcactcggacctctttgtaaatgtaatcttgccattctaaggggcctttcttcatccattcactcatgattgccacctggctaaatcagttaaaaaactcctcgcaactctgggtact

SEQ ID NO: 821 - DNA, 635 bp, Homo sapiens
  misc_feature (1)...(635): n = A,T,C or G
aggttgctcacctgaaggagcacaggagggttttccaggccatgtggctcaggttcctcaagcacaagctgcccctcagcctctacaagaaggtgctgctgattgtgcatgacgccatcctgccgcagctggcgcagcccacgctcatgatcgacttcctcacccgcgcctssgacctcgggggggccctcagcctcttggccttgaacgggctgttcatcttgattcacaaacacaacctggagtaccctgacttctaccggaagctctacggcctcttggacccctctgtctttcacgtcaagtaccgcgcccgcttcttccacctggctgacctcttcctgtcctcctcccacctccccgcctacctggtggccgccttcgccaagcggctggcccgcctggccctgacggctccccctgaggccctgctcatggtcctgcctttcatctgtaacctgctgcgccggcaccctgcctgccgggtcctcgtgcaccgtccacacggccctcgagttggaacgccgacccttacgaaccctgggagaggaggacccagcccagagccgggctttgggagagttccttgttggatttttcagggccttncagcggcattaccaacttgaggtttt

SEQ ID NO: 822 - DNA, 752 bp, Homo sapiens
tgcttttatcttgaatgtagccttcaactttgtgtaattccttaccaaaaaggccacatggcttaaaattcaacacacatttgtccccagtcttgtggtttataatttccacattgccatactgttcgatccacagtttacccacaatgatattatgcacacagcaggtgggatttgtccatgtatatgcctcattgtgttcaaggagctccaaggtgatggttcctttgggttctgcttctacactcttcccccagaatttcagtttgggatagatagagccatgaaagatgaagtcattgtttaatccttcagcatgaaatgcactgattggtgggtgatggctgacctgttcggagatgagtctaaatccaaggtcatctcgcactaattcataagtctctcccagcagtgggttgaaaggttttccagtccgttcccactgagaagcaacagcagatacagcaaacgcagctacacactgcatcctttccacaggatcagagagtgaactggccttgtggaygaggtaagtatgctccatgtattcagttaggcgctgtaggaagctcagaggctcattaaatataactggcatcgtgatcttggatagttccattccaatacattttctgaggatgctccagatactgaagtcatttctggaaaacataggagaaggcaaacttgttctgtgtttcttgatgccattggagagagcatctccgccaccacagtctttttcttcggac

SEQ ID NO: 823 - DNA, 899 bp, Homo sapiens
tttgccacagggtaaacttttattttagaatccaatcttttccccacacatacacaataaattaaacagaatccacagtaaatgtacattttttaacataaaaagtcagttactgttacttcatgatcacatgaggatcgtcacagctccgtgtccattagcacattaccctccttgtccttaactcttatccgaccggatctgtacttcgtttcttgatgaccgtttgcatatacggttttaacagtgccatctgggtattcccgtctcttgaactgggcagtatgtagttctctttggccattattaaactctatgagtttgttgccatcacgttgtactctgacaattgtaccatctgggaaaatgctttcttcttgtccatcaggaaataagtttttaacagtctggtcaggaaacgtgatttcttttcttccatctgggtaatgtttttctrtttaaaaagttgttacagtaaatattttttgaaggaagggaagaatttaatgagagggtggagcaagtttgtacctatttgtccacttgagaaatgtaagacttccagtcctccgggtatgtcgtgtgagtggtctgggcagctgcatagtagtagatctgtaaagacacacagtcagtctgccttttctccagagatggttaaactatggaggagaacacttctggaaacataccactctttggtctggcatgacctgcttcacgtcaccattaaagaaagtgacagtgatggtcttcccatctgcactcacttcctttcgagttccattgggaaacagtataacacggcacccattcttataaaccttttccacctttccatcaggatgactgatttctccctgtatgtcttggtcttcctcctcctctttatattcagg

SEQ ID NO: 824 - DNA, 1980 bp, Homo sapiens
  misc_feature (1)...(1980): n = A,T,C or G
acccgtccggggccggccaatttgcatatttggaatgcgccgctataaacccggctggggttttgcagcgatttcttagatgtaaaaatgagatctcaatagcagcgggctgggcacatcctcksmwytcysskwswskmtstgcccrgagctggtttccgtctctcggctcggggctggaactccggcccaacctaggcgcgcanccgcsacgagatggcgcacttccgatcaatgtcaaagccgccggggagccgggaaccccagcatgattcttggcctttgttcgcttctgatactaagagcagcacggtacattatttcacttgtcccgctccccttcataacagaaaaaggggactcaccctcaagaagtgattggtatggtaatttaaagcaacgcgcattcgctaggcctcgcgagcgtcgccgcgcggagaagccagctgtcccttggcagtgatttcggaaatgtgtcaaggcaattccaaaggtgaaaacgcagccaactggctcacggcaaagagtggtcggaagaagcgctgcccctacacgaagcaccagacactggagctggagaaggagtttctgttcaatatgtaccttactcgagagcggcgcctagagattagccgcagcgtccacctcacggacagacaagtgaaaatctggtttcagaaccgcagatngaaactgaagaaaatgaatcgagaaaaccggatccgggagctcacagccaactttaatttttcctgatgaatctccaggcgacgcggttttttcacttcccgagcgctggtcccctccctctgtcttcaggctctgccaggaactcgcacctgtgctggagccctgttcctccctcccacactcgccatctcctgggccgttacatctgtgcagggctggtttgttctgactttttgtttctttgtgtttgcttggtgctggttwatttgttgttttctgggggaaaaagccatatcatgctaaaattctatagagatagatattgtcctaagtgtcaagtcctgactgggctgggtttgctgtcttggggtcccactgctcgaaatggcccctgtcttcggccgagcntggtttcctgcccagcctggggcaaacctagccgaaggccgaggtcccattgttggcgctgaggtgtctggcctgaggtcaatggtgcaaaggagccgccaccggcatgtctgcctggagtgctgtgctgtgtttaatcaggggatacaggcccctgggtttcttttttctttcttcctttcttccttggccaagagaagggcttacaggcatggacatgcaggttggcaaacgggcttgactttggctgatttaaaaagtgagaaagaaagtaaaaaaggttaatttttccttcctctgtaagatatcccagctttaaaaagaaaaaaaaaaagaattaccaagagaaggggacttctcttccagtttctgtaaggtcttacattgcctgactaaaatgtttcatttacctctaaatttccatatccttctggctgtagataaataatgtagttttgtttatgcatttggaattagtggatttttttgtcattaaaattgttaccactggtaacatgtgacaagcacaccacaattctccctatcttgtgaagttgtttttttaaatcgccttgaacaaaaagtttttttttttgtttgtttttgctttctgaaattcacagaagcctaggaggactggggtaagcggaataaactagagaagggagacattgtttggatttccttcctataaatacaaatctgtataaatgtctattattatgaagaattgccaatcttgttttaagcaaatgcattctatcgttattataaatgttagttctagctctatttacttctaatcttaaatcagaataaattaatattgtattgctgctgtgcgtggaaaaagacgatgtttatgttcttatagaataaaag

SEQ ID NO: 825 - DNA, 333 bp, Homo sapiens
tctagatattgcccaatcgctgcccacagtgcacatacctttccaccagtcacatgtgagagggcagattttccaaatgctcatcaccacttggcactgtgtggactataattttggccagttaggaaatggcatctcattgttttcatcttaatttgcgtcagcctgattactcattgaaacttgtgaggttgagaaacttttcttaagcttattggccattcaagtttcctcctttatgaaatggttgttcatgtcatttkctcatttttatattagattgkwtttmtwttttccagctgacttgtaggaactctacatcttatcaatatt

SEQ ID NO: 826 - DNA, 658 bp, Homo sapiens
  misc_feature (1)...(658): n = A,T,C or G
ttttttttttttttttttttttttgaaggcttcatgaataatttattccatttgaagttttgttttttgtttttgtttttttttttttaaaaagtataaaccttttcatttcctcaatcacaatttgtacaactcagtgttatggcattcggcagcaatagtgtttgttccttattctctttttgtcacgttaaaaanaaagcaattggaccatattaaatgtcactgctaaacaacaactttaaaacgccccttcataaagtgaccaagctattttgagagggttgatgctgacatgtccagtaatgacgttacaatttgtagcttaaactcaataactttaaggtccacatatccagtttactttgaaaactaaagatgttttaaaacttcatgaatacatcaacctgaggagtattttaggkcccaaatccagtttttaaatttatactccacnaaaaangaaaatacatacataaaawtttaaaccmcngttytgggcccattwaaacaccmaaaaagaccccccnaaaagttaaganttccagcttanttctggangggtgggncaaaatarrawkktwtawwmawwwymytwwtccnkmattcagacaaactaaaatcttaagaggaaacccagaccaaaatatcactcatg

SEQ ID NO: 827 - DNA, 453 bp, Homo sapiens
  misc_feature (1)...(453): n = A,T,C or G
attatagagattaatctcctttgctcgaagtctntttaaatattagtcacatctaaaacatacttttacagcaacatctagactggtgtttgaccaaacaactgggcatcatagctgacacataaaattaaccatcacaaccatgttctaggcactgttcctcactgcctgagaagacaccgttatgtttattagggtttttgagttttatccacagcttttggttatctgcaaccatgtctcccaccattaacatagttcacactgagatgaggattccctatttaacacttggtcccaacttcttcacagtccatctggttttgtagagggaacataactggacattctggtcaggttaggtgaggtcaggccttcaggacgctattttcactgagttgctttataaggcacattatgcaaaattccatcagctcttctgttcactacatt

SEQ ID NO: 828 - DNA, 657 bp, Homo sapiens
aagagaaggacctagagattgagaggcttaagacgaagcaaaaagaactggaggccaagatgttggcccagaaggctgaggaaaaggagaaccattgtcccacaatgctccggcccctttcacatcgcacagtcacaggggcaaagcccctgaaaaaggctgtggtgatgcccctacagctaattcaggagcaggcagcatccccaaatgccgagatccacatcctgaagaataaaggccggaagagaaagctggagtccctggatgccctagagcctgaggagaaggctgaggactgctgggagctacagatcagcccggagctactggctcatgggcgccaaaaaatactggatctgctgaacgaaggctcagcccgagatctccgcagtcttcagcgcattggcccgaagaaggcccagctaatcgtgggctggcgggagctccacggccccttcagccaggtggaggacctggaacgcgtggagggcataacggggaaacagatggagtccttcctgaaggcaaacatcctgggtctcgccgccggccagcgctgtggcgcctcctgaccgtcgtctcctcactccgccttttcaaatttttgtataaccccgtgttgtgtaaatacagtttttgctccggtaaaaaaaaaaa

SEQ ID NO: 829 - DNA, 775 bp, Homo sapiens
  misc_feature (1)...(775): n = A,T,C or G
ggtttgagaaaatcaattcaaatctgncccttctgattgcanctctaaccaggttctgancggtgtcagagacttcccaatacatttcccttctagnatgcctcataaatccactcaaaagtaagacaccaaacacacacctcatttcctgaactgtgacttccaagctgacatttttctgagaagcataattattggtttcattgacaattaagttgaatgtttcatcatcaaaaaataattcaaaaagctctactgggttcaacttttcgctcttgagattcaaaagtccagaatccagtgctgaccagcttggaaaattgggtttaatgtctcttttggtccaactcttttctgggaaacatgatacctttaacttcttttgagcaggctggatctcaggctcattatctttttccacatctgagtcaccagagaatgagaggccttggagcagttcactcactcgagctttgtctttttttctcccttttcgggtaatgtctcctgcagcatattccagggatgagatgtgcatgcgggcccacaaatcacctgggtgacggtccttcagagtgttcaaatgtgcaactgtcctttcagtagcaataggagtactacaaggaatctggggtgcacactctctgttgggctttcctgaggcttctccactttgttccatttcttcagaagtttcttgctttgctttaaacaatctatctttagttacaatttcttcagctgggtgtagccccagctttttagaaggctgagg

SEQ ID NO: 830 - DNA, 413 bp, Homo sapiens
  misc_feature (1)...(413): n = A,T,C or G
agagcctgcaagtgacaaaggaagtgaggcagaggcccacatgcccccaccgttcacaccctacgtgcctcggattctgaacggcttggcctcggagaggacagcactgtctccgcagcagcagcagcagcagacctatggtgccatccacaacatcagcgggactatccctggacagtgcttggcgcakagcsmcasgkgcagtgtggcntgctgccccccaggaggcctgaggctgggtctcactgctctgaaaagacacaaccagaatggcctggggctcaggcccttggctgagtgggaatgcgttgggactgcccagctgagctatcaggtgcccatcttttctggtmccagcagtggtgaggagagcacaggcaggcctcgcccctcccttgctcanccagtttccc

SEQ ID NO: 831 - DNA, 876 bp, Homo sapiens
  misc_feature (1)...(876): n = A,T,C or G
gctgacctacagcagaagctgctggatgcagaaagtgaagacagaccaaaacaacgctgggagaatattgccaccattctggaagccaagtgtgccctgaaatatttgattggagagctggtctcctccaaaatacaggtcagcaaacttgaaagcagcctgaaacagagcaagaccagctgtgnykacatgcakaagatgctgtttgaggaacgaaatcattttgccgagatagagacagagttacaagctgagctggtcagaatggagcaacagcaccaagagaaggtgctgtaccttctcagccagctgcagcaaagccaaatggcagagaagcagttagaggaatcagtcagtgaaaaggaacagcagctgctgagcacactgaagtgtcaggatgaagaacttgagaaaatgcgagaagtgtgtgagcaaaatcagcagcttctccgagagaatgaaatcatcaagcagaaactgaccctcctccaggtagccagcagacagaaacatcttcctaaggatacccttctatctccagactcttcttttgaatatgtcccacctaagccaaaaccttctcgtgttaaagaaaagttcctggagcaaagcatggacatcgaggatctaaaatattgttcagagcattctgtgaatgagcatgaggatggtgatggtgatgatgatgagggggatgacgaggaatggaagccaacaaaattagttaaggtgtccagggaagaacatccaagggtgttcctgcaagggctggtgtgggaaccangccagtgtggggttccaggnaagccaaaagtncagactggtggtgttgactgtttgctgtgacccccacaaagtttncggaaccgcccacca

SEQ ID NO: 832 - DNA, 768 bp, Homo sapiens
  misc_feature (1)...(768): n = A,T,C or G
tagacatagaaaacatacagtaagaatatggtattataatcttacggsammamygysrmmtrnsckkknwrwmktkgwaaagykgyrmyrsgrcsyanramtanmmmtasctrgytrrkymrywtwwmmatycctksccmgggagtttgaaatttnatactatagaaataactttaggttttaggtagagttaaagaggtaaagcacatgttgnccacaancccaggaaagtatttttaagaaagattggattttcctacctttagagatctaaaaaaaatttaatataaaaaatcattttgtgttggtgtttattactagttcagatgagtggctgctgaaggggcccccttgtcattttcattataacccaatttccacttatttgaactcttaagtcataaatgtataatgacttatgaattagcacagttaagttgacactagaaactgcccatttctgtattacactatcaaataggaaacattggaaagatggggaaaaaaatcttattttaaaatggcttagaaagttttcagattactttgaaaattctaaacttctttctgtttccaaaacttgaaaatatgtagatggactcatgcattaagactgttttcaaagctttcctcacatttttaaagtgtgattttccttttaatatacatatttattttcyttaaagcagctatatcccaacccatgactttgggrgatatacccataaaaccmatataacagcaggggtattggagcagctttctcaa

SEQ ID NO: 833 - DNA, 1604 bp, Homo sapiens
  misc_feature (1)...(1604): n = A,T,C or G
aactagtatatttacaacatcagaaacttcaatatggagatttgttgttcctatatcatgatctttagcagcaactacaccataggcactgcacaacctgggtcctagatcaggacgtacaaaaaatcctggcaaatgagaggccaaattgaattttccttctggattacaatattctggcaatggcagactttttaaaagatcttcgtatcttgctggcatcatagtcttgaagtcttctcctgaaggccaatctttcaattttaaaacaactgtttctccactcttgtttttctgccgttttgaaacttcttcaaaaccatcccagaattccttaacattggcatttgaaatgatgctatctttgcagttcaggagatcagcttggtggtctccaaaatcaagactaattgattccgccttccataggctaatgttcattttcttatgcacaccagaaaccactgcaggctgtccttgtttccaacattctttgaaaagcttccaattactgctattcttataatccttaagccataaaatatgcttctcacagatccaagaatgtggtatatcactgtataatttattattttcatccactgcagatattatgctttcttcaggctcttctttaagctctggttttacatttatcttggaggttttacttggtggaattttgttttcaacaactgaagcaattatgtcatcaagaatgttaggcatagtccgtccacttttgctacttggggctcccattgaatatactggggcaaaggcaatgccagcatctgtasaccccacacgtagctttccagctgttgtagtcagcaaatcccgtaaggttgagccttgttcattattctgggacacaagaggtgatgttctgccatttggagattcagagttgtcttgttctctttcttctttaatttggttttcaagggtaagttctttgttttcttttttttcctctctggctttttgctctgcaagatctgctaaccagtgcagtggtgactgggattctggaggagttaacttgttatctgtgcctacatcactctctgggctgctgccaccatttttctcagacttcggaggagtattttgctgctgagactcaggcatgcacagagaaattttattactgtgattaagaacattctgtaaaacttgagatacaccattcattgtaggaaaatttccaacttgtaaattctgtttgttagtacaatgacaatgggatttaataccatatttttccctaagagtgtgcatggcatctagaagatctgtcaaaacagaaccaggtataatttgggttggcattaaatgtttgtgatcatgaggctgtccyttcacacacttcatccaagcatantagttctttatcyctagaactnctycctttcctttngccttgtaacaatctaagcaganccacaawkccacattttkggcagacccagtnrawkktaancawkgntgcttcacatgcatcacacatctcccggactcctctcactgctcttttccaggcaattttggcatcctttttcacccaggacaaagctgttttttcagatgttactaattga

SEQ ID NO: 834 - DNA, 617 bp, Homo sapiens
  misc_feature (1)...(617): n = A,T,C or G
gtccgtcagctggtagctttcattcgtaaaagagataaaagagtgcaggcgcatcgaaaacttgtggaagaacagaatgcagagaaggcgaggaaagccgaagagatgaggcggcagcagaagctaaagcaggccaaactggtggagcagtacagagaacagagctggatgactatggccaatttggagaaagagctcyassangrtgrmsrcrsgkkacgagaaggagtttggagatggatcggatgaaaatgaaatggaagaacatgaactcaaagatgaggaggatggtaaagacagtgatgaggccgaggacgctgagctctatgatgacctttactgcccagcatgtgacaaatcgttcaagacagaaaaggccatgaagaatcacgagaagtcaaagaagcatcgggaaatggtggccttgctaaaacaacagctggaggaggaagaagaaaatttttcaagacctcaaattgatgaaaatccattagatgacaattctgaggaagaaatggaagatgcaccaaaacaaaagctttctaaaaaacagargaaaaagaaacagaaaccagcacaggatgtacctggcaaagattcatatctgcctgcagctc

SEQ ID NO: 835 - DNA, 542 bp, Homo sapiens
  misc_feature (1)...(542): n = A,T,C or G
ttttttttttagaccaacattctttaatcacaaaggcacttgaggacccctacaaacccaaagtctctgccaagagtggccctgcagacgccccacctgccaccctccatccacccatccatccacacactcagagttcatcgtgacctgcagagggctccacactaggcttgatgaagatgccttccatggccttccacgtattgtgcgtgttggcactgggcatgccgtggacctcatgctgcccacggatggggcttccatactgctcacccgtgactgacaggaacacagaggtgcccacatgctngrarsgcacagcagcctcacgctcccagnngctgntccagagcagcgcactgtccatanngktccaggtcgtcgccctcgccgtcttccccaaaggcactcacctcctggttgttggacagcggcgangggaagtggtgcgtgtgcaggttcnttgnccgtaagcacatgcgtgagcctcaccgcctgcccgcagcgcaccgcaagggcccaggcggagccgacgctcgcgc

SEQ ID NO: 836 - DNA, 542 bp, Homo sapiens; identical to SEQ ID NO: 835
  misc_feature (1)...(542): n = A,T,C or G

SEQ ID NO: 837 - DNA, 719 bp, Homo sapiens
  misc_feature (1)...(719): n = A,T,C or G
aaaaggtcccccttctgggaaagaccgagtgaagaaaggtggatcctacatgtgccataggtcttattgttacaggtatcgctgtgctgctcggagccagaacacacctgatagctctgcttcgaatctggrnttccgctgtncagccgaccgnctgcccactatngactgacaaccaaggaaagtcttccccantccaaggagcagtcgtgtctgacctacattgggcttttctcagaactttgaacgatcccatgcaaagaattcccaccctgaggtgtttnacatacctgcccaatgncaaaggaaccgccttgtgagaccaaattgctgacctgggtcagtgcatgtgctttatggtgtggtgcatctttggagatcatcgccatattttacttttgagagtctttaaagaggaaggggagtggagggaaccctgagctaggcttcaggaggcccgcgtcctacgcaggctctgcacaggggttagaccccaggtccgacgcttgaccttcctgggcctcaagtgccctcccctatcaaatgacagggatggacagcatgacctctgggtgtctctccaactcaccagttctaaaaagggtatcagattctattgtgacttcataagtgagaatttatgatagattattttttagctattttttccatgtgtgaaccttgagtgatactaatcatgtaaagtaagagttccctta

SEQ ID NO: 838 - DNA, 579 bp, Homo sapiens
  misc_feature (1)...(579): n = A,T,C or G
aagatatgcagagatattccaggatcttttagctttggtgcggtctcctggagacagtgttattcgccaacagtgtgttgaatatgtcacatccattttgcagtctctctgtgatcaggacattgcacttatcttaccaagctcttctgaaggttctatttctganctggagcagctctccaattctctaccaaataaagaattgatgacctcaatctgtgactgtctgttggctacgctagctaactctgagagcagttacaactgtttactgacatgtgtcagaacaatgatgtttcttgcagagatgattatggattatttcatttaaaaagttctttaaggaaaaacagtagtgctctgcatagtttactgaaacgagtggtcagcacatttagtaaggacacaggagagcttgcatcttcatttttagaatttatgagacaaattcttaactctgacacaattgggatgctgtgggagatgataatgggtctcatgggaagtaggaggggagctcatacatcacggacgatgagtattaatgctgcagagttaaaccagcttcttccaaggcaa

SEQ ID NO: 839 - DNA, 1172 bp, Homo sapiens
  misc_feature (1)...(1172): n = A,T,C or G
aaccaaacctcccaacttagtgaaaacaaggcattcaatgacagaccagcagcagaaactgcntattacctcctaatcattttatgaagaaatacctatataaaaacaaacactaaagagnacaaatagatttaactaaagtgacaagcataattataaataaataccagattatcagattttaaacaataatctataacagttttactatctaaggattttcactccaagaagaaaaaatacatagtaacgccaagcttgcaggacgatgacttaacagatacattttctcttaatggaaacttatctagcttcagtaatatttctggatgtagcatcaagttgctgttgcacatttttaaaagactggtccagcagtgtttcctcttcatttaaagtattggcaatagcatcattacatggattgtccagaatgtcttcgtttaatccatttgactcctccttttgatcctcatcagtattaacctcttcaaccgtgtgtgccctgggtgtattcattaacatatcatttccyagggtctgactattactcagcagcttkgcctgccttctttccarggccagttggttwatttcycycaattctttgttgttgctcttctgttaggcttctacttaactcagaagcaaacatctcactttcagataagtttgtcagaaagggatctaattcagtagaagtgacatcatgttcattattctccgcaacttcatcattattgctaacaaaatcttcatgtaaaatagggagatcaagtcgaattcgttttaaacaggtctgaacttcctttttacttcccaggtattcaactctgtcaataaaatcctcaaactgcagtttagggaatagcctatgtgcccagtgctccatgtgtctgattagcatcttcaagtcttcagcctcatgacctttacctttgaattttgccttatcaaatacatgccttaaggctggaagtcctctctctgaaattaatctctgagcatccagcttgggtatatttcttttaactgttctctttggaggtacaggaacaggtgctccatttcctgactcttcatcaggctcagttccttcaccatcttgtctctctggagaggctggaggtgggaaaggaggaaaagtttcatcttctacatgctcataatct

SEQ ID NO: 840 - DNA, 1145 bp, Homo sapiens
  misc_feature (1)...(1145): n = A,T,C or G
cctcctactcccaaacaaatctttggggaaaaaaaaactaccaactgtcagccatgggcctgacggcgctaagctctggggctccgtgcactgacgtggggccagccacagggaggcggggatsmrgymgcgngassscmggakywkgrscwscwscsrsgymrgkwgcagnrgcrgyggcrhcrsgancmrmagcagcntgmwgcagctcawgcacctggagtccttttaygaaaaamcyyctcctgggcttatcaaggaagatgagactaagccagaagattgcataccagatgtaccaggcaatgaacacgccagggaatttctggctcatgcaccaactaaaggactttggatgccactggggaaagaagtcaaagttatgcagtgttggcgttgcaaacgctatggtcaccgaacgggtgacaaagaatgccctttctttatcaaaggcaaccaaaagttagagcagttcagagtggcacatgaagatcccatgtatgacatcatacgagacaataaacgacatgaaaaggacgtaaggatacagcagttaaaacagttactggaggattctacctcagatgaagataggagcagctccmgttcctctgaaggtaaagagaaacacaagaaaaagaagaagaaagaaaagcataagaaaaggaagaaagaaaagaaaaagaagaaaaaacggaagcacaaatcttccaagtcaaatgagggttctgactcagagtgacaaggatgtgacttgttcaacattctcttctcaaacactgaccaaggaacagaggaagatgcagtcagagaaagcagcaggatagagacgccgagagaggagtatatgtgggtcacagcagtgagctcccacccgccttgcagtgaagatgtgaccccaggagagggagtgtctccttccaggtgctagctctggacagcagctgattttaggcaggaaagtttcttcatcgttgtcctccctgctggtcacatgagtttacgattcctttgaagtgtctcccacagggtggcaggactgggagaatctctgaggcgtgtcttccaggccctcccacagcttgtgccctccacagtgtggactcaggtcccatagacatcaggctggagtcttctctgttgtt

SEQ ID NO: 841 - DNA, 642 bp, Homo sapiens
  misc_feature (1)...(642): n = A,T,C or G
ttttttataaaaataaatatttattgccatttgaagctttatgtacacctttaaaagcacatgtacaaatgtgggaaattacaaaaatcaacctaaaaccctttttctcaaagtatacataaatgtacatccaagatcagtggtgctaccatcattagaataaaaaataagtctgtctggacataaacaagcaatcattttaagtgtcattcagatattctcctttatatttaaaactccaaaaaatactaagaggcccaatatatccagaaaattgtgttttcactttaccctaacttatgaatagtggtatacaaatatatttccatctttttgtccagccagcaaatgagagtctgtacccgaccatttcacaaaagaccaatgttggtcagagacagskskgagrrksgymktasrstkamysasaakkarstsmmamayrgsrmttnykcmasrastcamkmtykytgsyrcasrgwkrwctywsrmswmwmmwkmsargmmccatttcagaataggctttgtgacagactgaagcttggtaagaatcatcaatgtgcatctttttcaggagttgaccagtttttaaattccaaataacaatgttgttcataatagtagtaccaagcagagcttctt

SEQ ID NO: 842 - DNA, 452 bp, Homo sapiens
  misc_feature (1)...(452): n = A,T,C or G
acggcctggtggagcagctgtacgacctcaccctggagtacctgcacagccaggcacactgcatcggcttcccggagctggtgctgcctgtggtcctgcagctgaagtcgttcctccgggagtgcaaggtggccaactactgccggcaggtgcagcagctgcttgggaaggttcaggagaactcggcatacatctrcagccgccgccagagggtttccttcggcgtctctgagcagcaggcagtggaagcctgggagaagctgacccgggaagaggggacacccytgaccttgtactacagccactggcgcaantgcgtgaccgggagatccagctggagatcagtggcaaagagcggctggaagacctgwacttccctgagatcaaacgaaggaagatggctgacaggaaggatgaggacaggwagcaatttaaagacctcttttgacctg

SEQ ID NO: 843 - DNA, 805 bp, Homo sapiens
  misc_feature (1)...(805): n = A,T,C or G
ggcttatacaacatagtggggaacgcatgggaatggacttcagactggtggactgttcatcattctgttgaagaaacgcttaacccaaaaggtcccccttctgggaaagaccgagtgaagaaaggtggatcctacatgtgccataggtcttattgttacaggtatcgctgtgctgctcggagccagaacacacctgatagctctgcttcgaatctggrnttccgctgtncagccgaccgnctgcccactatngactgacaaccaaggaaagtcttccccantccaaggagcagtcgtgtctgacctacattgggcttttctcagaactttgaacgatcccatgcaaagaattcccaccctgaggtgtttnacatacctgcccaatgncaaaggaaccgccttgtgagaccaaattgctgacctgggtcagtgcatgtgctttatggtgtggtgcatctttggagatcatcgccatattttacttttgagagtctttaaagaggaaggggagtggagggaaccctgagctaggcttcaggaggcccgcgtcctacgcaggctctgcacaggggttagaccccaggtccgacgcttgaccttcctgggcctcaagtgccctcccctatcaaatgacagggatggacagcatgacctctgggtgtctctccaactcaccagttctaaaaagggtatcagattctattgtgacttcataagtgagaatttatgatagattattttttagctattttttccatgtgtgaaccttgagtgatactaatcatgtaaagtaagagttccctta

SEQ ID NO: 844 - DNA, 702 bp, Homo sapiens
  misc_feature (1)...(702): n = A,T,C or G
tttttttttttttttttgcaggtgcatttgtttctttatttaaaaaaatcatctgggggcatggtctgaggaggacacccctcccatggctttggggaggacgcaggttccaggagtcacagggcagaaacacgcggggtgggtgggggcgtggccggagtggggaggggctgtsccaggcacctgggggtggctcccacggcaccaggtgggctagggcaacagtatgtacaggcgagcagtgctcctggacccggtcggggccggctggggcccatttctgcggcaggggagctctggggcacagggtctgagtcccatcttgggctkcagggaccgcgaggscgtccagggaggctggacagcgggggcctttatctgggcccatcaggtggatgagaacggacactgcaaaccgctcaccacctgggccagggctaggctatccggcagggcctccccmmctgaatcctgcgtgcgcagaactcaagccggcatncaggcagtkggaacgncccgcangctgggcttggktgsyckcrsgcacgtgacaggtggggcccgtgtcctgataaacggacaggaacaaaaggaacgcaaggtctgggacccacggctctgggagcagcgccacccaggctggctcctagcagagaaatgggaatcgcaaatgcattgcaatgtgcagtgaagagacgcgag

We claim:

1. A library of polynucleotides, the library comprising the sequence information of at least one of SEQ ID NOS:1-844.

2. The library of claim 1, wherein the library is provided on a nucleic acid array.

3. The library of claim 1, wherein the library is provided in a computer-readable format.

4. The library of claim 1, wherein the library comprises a differentially expressed polynucleotide comprising a sequence selected from the group consisting of SEQ ID NOS:9, 39, 42, 52, 62, 74, 119, 172, 317, and 379.

5. The library of claim 1, wherein the library comprises a polynucleotide differentially expressed in a human breast cancer cell, where the polynucleotide comprises a sequence selected from the group consisting of SEQ ID NOS: 4, 9, 39, 42, 52, 62, 65, 66, 68, 74, 81, 114, 123, 144, 130, 157, 162, 172, 178, 183, 202, 214, 219, 223, 258, 298, 317, 338, 379, 384, 386, and 388.

6. The library of claim 1, wherein the library comprises a polynucleotide differentially expressed in a human colon cancer cell, where the polynucleotide comprises a sequence selected from the group consisting of SEQ ID NOS: 1, 39, 52, 97, 119, 134, 172, 176, 241, 288, 317, 357, 362, and 374.

7. The library of claim 1, wherein the library comprises a polynucleotide differentially expressed in a human lung cancer cell, where the polynucleotide comprises a sequence selected from the group consisting of SEQ ID NOS: 9, 34, 42, 62, 74, 106, 119, 135, 154, 160, 260, 308, 323, 349, 361, 369, 371, 379, 395, 381, and 400.

8. An isolated polynucleotide comprising a nucleotide sequence having at least 90% sequence identity to an identifying sequence of SEQ ID NOS:1-844 or a degenerate variant thereof.

9. An isolated polynucleotide according to claim 8, wherein the polynucleotide comprises a seqeuence encoding a polypeptide of a protein family selected from the group consisting of: 4 transmembrane segments integral membrane proteins, 7 transmembrane receptors, ATPases associated with various cellular activities (AAA), eukaryotic aspartyl proteases, GATA family of transcription factors, G-protein alpha subunit, phorbol esters/diacylglycerol binding proteins, protein kinase, protein phosphatase 2C, protein tyrosine phosphatase, trypsin, wnt family of developmental signaling proteins, and WW/rsp5/WWP domain containing proteins.

10. The polynucleotide of claim 9, wherein the polynucleotide comprises a sequence of one of SEQ ID NOS: 24, 41, 101, 157, 291, 305, 315, 341, 63, 116, 134, 136, 151, 384, 404, 308, 213, 367, 188, 251, 202, 315, 367, 397, 256, 382, 169, 23, 291, 324, 330, 341, 353, 188, 379, and 395.

11. The polynucleotide of claim 8, wherein the polynucleotide comprises a seqeuence encoding a polypeptide having a functional domain selected from the group consisting of: Ank repeat, basic region plus leucine zipper transcription factors, bromodomain, EF-hand, SH3 domain, WD domain/G-beta repeats, zinc finger (C2H2 type), zinc finger (CCHC class), and zinc-binding metalloprotease domain.

12. The polynucleotide of claim 11, wherein the polynucleotide comprises a sequence of one of SEQ ID NOS: 116, 251, 374, 97, 136, 242, 379, 306, 386, 18, 335, 61, 306, 386, 322, 306, and 395.

13. A recombinant host cell containing the polynucleotide of claim 8.

14. An isolated polypeptide encoded by the polynucleotide of claim 8.

15. An antibody that specifically binds a polypeptide of claim 14.

16. A vector comprising the polynucleotide of claim 8.

17. A polynucleotide comprising the nucleotide sequence of an insert contained in a clone deposited as ATCC accession number xx, xx, xx, xx, xx, xx, xx, xx, or xx.

18. A method of detecting differentially expressed genes correlated with a cancerous state of a mammalian cell, the method comprising the step of:
detecting at least one differentially expressed gene product in a test sample derived from a cell suspected of being cancerous, where the gene product is encoded by a gene corresponding to a sequence of at least one of SEQ ID NOS:4, 9, 39, 42, 52, 62, 65, 66, 68, 74, 81, 114, 123, 144, 130, 157, 162, 172, 178, 183, 202, 214, 219, 223, 258, 298, 317, 338, 379, 384, 386, 388, 1, 39, 52, 97, 119, 134, 172, 176, 241, 288, 317, 357, 362, 374, 9, 34, 42, 62, 74, 106, 119, 135, 154, 160, 260, 308, 323, 349, 361, 369, 371, 379, 395, 381, and 400;
wherein detection of the differentially expressed gene product is correlated with a cancerous state of the cell from which the test sample was derived.

19. The method of claim 18, wherein said detecting step is by hybridization of the test sample to a reference array, wherein the reference array comprises an identifying sequence of at least one of SEQ ID NOS:1-844.

20. The method of claim 18, wherein the cell is a breast tissue derived cell, and the differentially expressed gene product is encoded by a gene corresponding to a sequence of at least one of SEQ ID NOS: 4, 9, 39, 42, 52, 62, 65, 66, 68, 74, 81, 114, 123, 144, 130, 157, 162, 172, 178, 183, 202, 214, 219, 223, 258, 298, 317, 338, 379, 384, 386, and 388.

21. The method of claim 18, wherein the cell is a colon tissue derived cell, and the differentially expressed gene product is encoded by a gene corresponding to a sequence of at least one of SEQ ID NOS: 1, 39, 52, 97, 119, 134, 172, 176, 241, 288, 317, 357, 362, and 374.

22. The method of claim 18, wherein the cell is a lung tissue derived cell, and the differentially expressed gene product is encoded by a gene corresponding to a sequence of at least one of SEQ ID NOS: 9, 34, 42, 62, 74, 106, 119, 135, 154, 160, 260, 308, 323, 349, 361, 369, 371, 379, 395, 381, and 400.
